(19) United States
(12) Patent Application Publication
(10) Pub. No.: US 2012/0070430 A1
(43) Pub. Date: Mar. 22, 2012

(54) IDENTIFICATION OF TUMOR-ASSOCIATED MARKERS FOR DIAGNOSIS AND THERAPY

(76) Inventors: Ugur Sahin, Mainz (DE); Ozlem Tureci, Mainz (DE); Michael Koslowski, Frankfurt (DE)

(21) Appl. No.: 13/266,368

(22) PCT Filed: Apr. 22, 2010
(86) PCT No.: PCT/EP10/02490

§ 371 Date: Oct. 26, 2011

Related U.S. Application Data
(60) Provisional application No. 61/173,871, filed on Apr. 29, 2009.

(30) Foreign Application Priority Data
Apr. 29, 2009 (EP) 09005931.2

(51) Int. Cl. A61K 39/395; C07K 16/18; C07K 14/47; C12N 5/10; C12N 1/21; A61P 35/00; C07H 21/00; A61K 39/00; C12Q 1/68; G01N 33/53; A61K 35/12; C07H 21/04; C12N 1/19

(52) U.S. Cl. 424/133.1; 536/24.5; 530/389.7; 530/350; 435/325; 435/252.33; 435/254.2; 435/348; 435/353; 435/354; 435/358; 435/365; 435/363; 435/366; 536/23.5; 435/372.1; 530/388.85; 530/387.3; 424/184.1; 435/6.14; 435/7.1; 436/501; 424/174.1; 424/156.1; 424/93.21

(57) ABSTRACT

The invention relates to genetic products the expression of which is associated with cancer diseases. The invention also relates to the therapy and diagnosis of diseases in which the genetic products are expressed or aberrantly expressed, in particular cancer diseases.

[0001] The invention relates to nucleic acids and encoded polypeptides which are expressed in cancers. The invention also relates to agents which bind the polypeptides. The nucleic acids, polypeptides coded for by such nucleic acids and peptides derived therefrom, as well as related antibodies and cytolytic T lymphocytes, are useful, inter alia, in diagnostic and therapeutic contexts.

[0002] Despite interdisciplinary approaches and exhaustive use of classical therapeutic procedures, cancers are still among the leading causes of death.

[0003] More recent therapeutic concepts in cancer therapy aim at incorporating the patient's immune system into the overall therapeutic concept by using recombinant tumor vaccines and other specific measures such as antibody therapy. A prerequisite for the success of such a strategy is the recognition of tumor-specific or tumor-associated antigens or epitopes by the patient's immune system whose effector functions are to be interventionally enhanced.

[0004] Tumor cells biologically differ substantially from their nonmalignant cells of origin. These differences are due to genetic alterations acquired during tumor development and result, inter alia, also in the formation of qualitatively or quantitatively altered molecular structures in the cancer cells. Tumor-associated structures of this kind which are recognized by the specific immune system of the tumor-harboring host are referred to as tumor-associated antigens.

[0005] The specific recognition of tumor-associated antigens involves cellular and humoral mechanisms which are two functionally interconnected units: CD4⁺ and CD8⁺ T lymphocytes recognize the processed antigens presented on the molecules of the MHC (major histocompatibility complex) classes II and I, respectively, while B lymphocytes produce circulating antibody molecules which bind directly to unprocessed antigens. The potential clinical-therapeutical importance of tumor-associated antigens results from the fact that the recognition of antigens on neoplastic cells by the immune system leads to the initiation of cytotoxic effector mechanisms and, in the presence of T helper cells, can cause elimination of the cancer cells (Pardoll, Nat. Med. 4:525-31, 1998).

[0006] Antibody based cancer therapies have been successfully introduced into the clinic and have emerged as the most promising therapeutics in oncology over the last decade. Eight antibodies have been approved for treatment of neoplastic diseases, most of them, however in lymphoma and leukemia (Adams G P, Weiner L M, Nat Biotechnol 23:1147-57, 2005).

[0007] One of the challenges to be mastered for the advent of the next generation of upgraded antibody-based cancer therapeutics is the selection of appropriate target molecules, which is the key for a favorable toxicity/efficacy profile.

[0008] The search for genes tightly silenced in the vast majority of healthy tissues moves into the focus of attention the intriguing observation that genes of the gametogenic and/or trophoblastic lineage are frequently ectopically activated and robustly expressed in human cancer. Based on phenotypical similarities between germ cells, pregnancy trophoblast and cancer cells, John Beard proposed as much as 100 years ago a “trophoblastic theory of cancer” (Beard J, Lancet 1:1758-63, 1902; Gurchot C, Oncology 31:310-3, 1975). The discovery of the sporadic production of chorionic gonadotropin, alpha-fetoprotein, CEA and other trophoblastic hormones by cancer cells provided the first molecules shared between neoplastic and trophoblastic cells (Acevedo H F et al., Cancer 76:1467-75, 1995; Dirnhofer S et al., Hum Pathol 29:377-82, 1998; Gurchot C, Oncology 31:310-3, 1975; Iles R K, Chard T, J Urol 145:453-8, 1991; Laurence D J, Neville A M, Br J Cancer 26:335-55, 1972). The concept was reignited by the inauguration of the steadily growing so-called cancer/germline (CG) class of genes, which represents more than 100 members, each expressed in a variety of tumor types. The observation that entire trophoblastic and gametogenic programs escape transcriptional silencing and are ectopically activated in cancer cells (Koslowski M et al., Cancer Res 64:5988-93, 2004; Simpson A J et al., Nat Rev Cancer 5:615-25, 2005) indicates that within this class of genes with exquisitely selective tissue distribution, appropriate targets for mAB therapy may be found.

[0009] It was the object of the present invention to provide target structures for a diagnosis and therapy of cancers.

[0010] This object is achieved by the subject matter of the claims.

[0011] According to the invention, placenta-specific genes are identified which are selectively or aberrantly expressed in tumor cells and thus, provide target structures for therapeutic and diagnostic approaches.

[0012] The nucleic acids identified according to the invention to be selectively or aberrantly expressed in tumor cells are selected from the group consisting of (a) a nucleic acid which comprises a nucleic acid sequence selected from the group consisting of SEQ ID NOs: 1-540, 541, 545, 549, 553, 557, 560, 563, 566, 570, 574, 577, 580, 583, 587, 591, 595, 599, 602, 606, 610, 613, 617, 620, 624, 634, 638, 642, 646, 649, 653, 656, 660, 664, 668, 671, 675, 679, 682, and 686 of the sequence listing, a part or derivative thereof, (b) a nucleic acid which hybridizes with the nucleic acid of (a) under stringent conditions, (c) a nucleic acid which is degenerate with respect to the nucleic acid of (a) or (b), and (d) a nucleic acid which is complementary to the nucleic acid of (a), (b) or (c). These nucleic acids are also termed “tumor-associated nucleic acids” herein.

[0013] In another aspect, the invention relates to antigens encoded by the tumor-associated nucleic acids identified according to the invention. Accordingly, the tumor-associated antigens identified according to the invention have an amino acid sequence encoded by a nucleic acid which is selected from the group consisting of (a) a nucleic acid which comprises a nucleic acid sequence selected from the group consisting of SEQ ID NOs: 1-540, 541, 545, 549, 553, 557, 560, 563, 566, 570, 574, 577, 580, 583, 587, 591, 595, 599, 602, 606, 610, 613, 617, 620, 624, 634, 638, 642, 646, 649, 653, 656, 660, 664, 668, 671, 675, 679, 682, and 686 of the sequence listing, a part or derivative thereof, (b) a nucleic acid which hybridizes with the nucleic acid of (a) under stringent conditions, (c) a nucleic acid which is degenerate with respect to the nucleic acid of (a) or (b), and (d) a nucleic acid which is complementary to the nucleic acid of (a), (b) or (c). In a preferred embodiment, the tumor-associated antigens identified according to the invention comprises an amino acid sequence selected from the group consisting of SEQ ID NOs: 542, 546, 550, 554, 567, 571, 584, 588, 592, 596, 603, 607, 614, 621, 625, 635, 639, 643, 650, 657, 661, 665, 672, 676, and 683 of the sequence listing, a part or derivative thereof.

[0014] If according to the invention reference is made to nucleic acids comprising certain nucleic acid sequences or tumor-associated antigens comprising certain amino acid sequences this also includes embodiments wherein the nucleic acids or tumor-associated antigens consist of these certain nucleic acid sequences or amino acid sequences, respectively.

[0015] The present invention generally embraces the treatment and/or diagnosis by targeting tumor-associated nucleic acids or tumor-associated antigens identified according to the invention. This provides for the selective detection of cells and/or eradication of cells that express such tumor-associated nucleic acids and/or tumor-associated antigens thereby minimizing adverse effects to normal cells not expressing such tumor-associated nucleic acids and/or tumor-associated antigens. Thus, preferred diseases for a therapy or diagnosis are those in which one or more of the tumor-associated nucleic acids and/or tumor-associated antigens identified according to the invention are expressed such as tumor diseases, in particular cancer diseases such as those described herein.

[0016] The present invention generally involves the use of tumor-associated nucleic acids and tumor-associated antigens identified according to the invention or of parts or derivatives thereof, of nucleic acids directed against said tumor-associated nucleic acids, of antibodies or T cells directed against the tumor-associated antigens identified according to the invention or parts or derivatives thereof and/or of host cells expressing the tumor-associated antigens identified according to the invention or parts or derivatives thereof for therapy, prophylaxis, diagnosis and/or monitoring of neoplastic diseases such as tumor diseases, in particular cancer diseases such as those described herein.

[0017] This may also involve the use of a combination of two or more of these nucleic acids, antigens, antibodies, T cells and/or host cells.

[0018] In those embodiments of the invention relating to the use of antibodies directed against the tumor-associated antigens identified according to the invention or parts or derivatives thereof also T cell receptors directed against the tumor-associated antigens identified according to the invention or parts or derivatives thereof, optionally in a complex with MHC molecules, may be used.

[0019] Especially suitable for therapy, prophylaxis, diagnosis and/or monitoring is a part of the tumor-associated antigens identified according to the invention which corresponds to the non-transmembrane portion, in particular the extracellular portion of the tumor-associated antigens or is comprised thereof. Therefore, according to the invention, a part of the tumor-associated antigens identified according to the invention which corresponds to the non-transmembrane portion, in particular the extracellular portion of the tumor-associated antigens or is comprised thereof, or a corresponding part of the nucleic acids coding for the tumor-associated antigens identified according to the invention is preferred for therapy, prophylaxis, diagnosis and/or monitoring. Similarly the use of antibodies is preferred which are directed against a part of the tumor-associated antigens identified according to the invention which corresponds to the non-transmembrane portion, in particular the extracellular portion of the tumor-associated antigens or is comprised thereof.

[0020] Preferred diseases for a therapy, prophylaxis, diagnosis and/or monitoring are those in which one or more of the tumor-associated nucleic acids identified according to the invention are selectively expressed or abnormally expressed. Particularly preferred diseases for a therapy, prophylaxis, diagnosis and/or monitoring are those in which one or more of the tumor-associated nucleic acids identified according to the invention and/or one or more of the tumor-associated antigens encoded thereby are selectively expressed or abnormally expressed.

[0021] In one aspect, the invention relates to a pharmaceutical composition comprising an agent which recognizes a tumor-associated antigen identified according to the invention or a nucleic acid coding for the tumor-associated antigen and which is preferably selective for cells which have expression or abnormal expression of a tumor-associated antigen identified according to the invention or a nucleic acid coding for the tumor-associated antigen.

[0022] In a further aspect, the invention relates to a pharmaceutical composition comprising an agent which (I) inhibits expression or activity of a tumor-associated antigen identified according to the invention, and/or (II) has tumor-inhibiting or tumor-destroying activity and is selective for cells expressing or abnormally expressing a tumor-associated nucleic acid and/or a tumor-associated antigen identified according to the invention, and/or (III) when administered, selectively increases the amount of complexes between an MHC molecule and a tumor-associated antigen identified according to the invention or a part thereof, such as a peptide epitope. In particular embodiments, said agent may cause induction of cell death, reduction in cell growth, damage to the cell membrane or secretion of cytokines and preferably have a tumor-inhibiting activity.

[0023] In one embodiment, an agent which inhibits expression or activity of a tumor-associated antigen is specific for a tumor-associated nucleic acid identified according to the invention. In another embodiment, an agent which inhibits expression or activity of a tumor-associated antigen is specific for a tumor-associated antigen identified according to the invention. According to the invention the phrase “inhibit expression and/or activity” includes a complete or essentially complete inhibition of expression and/or activity and a reduction in expression and/or activity. Preferably, said inhibition of expression of a tumor-associated antigen identified according to the invention may take place by inhibiting the production of or reducing the level of transcript, i.e. mRNA, coding for a tumor-associated antigen identified according to the invention, e.g. by inhibiting transcription or inducing degradation of transcript, and/or by inhibiting the production of tumor-associated antigen identified according to the invention, e.g. by inhibiting translation of transcript coding for a tumor-associated antigen identified according to the invention. Preferably, said inhibition of expression and/or activity of a tumor-associated antigen identified according to the present invention reduces tumor cell growth and/or induces tumor cell death and thus, has a tumor-inhibiting or tumor-destroying effect.

[0024] In a particular embodiment, the agent which inhibits expression of a tumor-associated antigen identified according to the invention is an inhibitory nucleic acid (e.g., anti-sense oligonucleotide, ribozyme, iRNA, siRNA or a DNA encoding the same) selectively hybridizing to and being specific for a tumor-associated nucleic acid identified according to the invention, thereby inhibiting (e.g., reducing) transcription and/or translation thereof.

[0025] Inhibitory nucleic acids include oligonucleotides having sequences in the antisense orientation relative to the target nucleic acids. Suitable inhibitory oligonucleotides typically vary in length from five to several hundred nucleotides, more typically about 20-70 nucleotides in length or shorter, even more typically about 10-30 nucleotides in length. These inhibitory oligonucleotides may be administered as free (naked) nucleic acids or in protected forms, e.g., encapsulated in liposomes. The use of liposomal or other protected forms may be advantageous as it may enhance in vivo stability and thus facilitate delivery to target sites.

[0026] Also, the target tumor-associated nucleic acid may be used to design ribozymes that target the cleavage of the corresponding mRNAs in tumor cells. Similarly, these ribozymes may be administered in free (naked) form or by the use of delivery systems that enhance stability and/or targeting, e.g., liposomes.

[0027] Also, the target tumor-associated nucleic acid may be used to design siRNAs that can inhibit (e.g., reduce) expression of the tumor-associated nucleic acid. The siRNAs may be administered in free (naked) form or by the use of delivery systems that enhance stability and/or targeting, e.g., liposomes. They may also be administered in the form of their precursors or encoding DNAs.

[0028] In a further embodiment, the agent which inhibits activity of a tumor-associated antigen identified according to the invention is an antibody that specifically binds to said tumor-associated antigen. Binding of the antibody to the tumor-associated antigen can interfere with the function of the tumor-associated antigen, e.g. by inhibiting binding activity or catalytic activity.

[0029] Also, the present invention in another aspect relates to therapies for treatment of tumor diseases involving the administration of a ligand of a target molecule, i.e. a tumor-associated nucleic acid or tumor-associated antigen identified according to the invention. In this respect, a nucleic acid may be administered that selectively hybridizes to the target nucleic acid or an antibody may be administered that specifically binds to a target antigen, attached to therapeutic effector moieties, e.g., radiolabels, cytotoxins, cytotoxic enzymes, and the like in order to selectively target and kill cells that express these targets, e.g. tumor cells.

[0030] In one embodiment of the above aspects, the agent is an antisense nucleic acid which hybridizes selectively with the nucleic acid coding for the tumor-associated antigen. In a further embodiment, the agent is a siRNA preferably comprising a sense RNA strand and an antisense RNA strand, wherein the sense and antisense RNA strands form an RNA duplex, and wherein the sense RNA strand comprises a nucleotide sequence substantially identical to a target sequence of about 19 to about 25 contiguous nucleotides in a nucleic acid coding for the tumor-associated antigen, preferably mRNA coding for the tumor-associated antigen. In a further embodiment, the agent is an antibody which binds selectively to the tumor-associated antigen, in particular a complement-activated or toxin conjugated antibody which binds selectively to the tumor-associated antigen. In a preferred embodiment, the antibody which binds selectively to the tumor-associated antigen is coupled to a therapeutically useful substance and/or recruits natural or artificial effector mechanisms to said cell expressing or abnormally expressing said tumor-associated antigen. In a further embodiment, the agent is a cytotoxic T lymphocyte which recognizes the tumor-associated antigen or a part thereof bound by an MHC molecule on a cell and lyses the cells labeled in this way. In a further embodiment, the agent is a T helper lymphocyte which recognizes the tumor-associated antigen or a part thereof bound by an MHC molecule on a cell and enhances effector functions of other cells specifically recognizing said tumor-associated antigen or a part thereof.

[0031] In a further embodiment, the agent comprises two or more agents which each recognize different tumor-associated antigens or different nucleic acids coding for tumor-associated antigens and/or inhibit expression or activity of different tumor-associated antigens, and/or have tumor-inhibiting or tumor-destroying activity and are selective for cells expressing or abnormally expressing different tumor-associated antigens, and/or when administered, selectively increase the amount of complexes between MHC molecules and different tumor-associated antigens or parts thereof, wherein at least one of said different tumor-associated antigens is a tumor-associated antigen identified according to the invention.

[0032] Preferably, a tumor-associated antigen selectively limited to tumors serves as a label for recruiting effector mechanisms to this specific location. In this aspect, the invention includes embodiments wherein the agent itself does not have an ability to inhibit activity of a tumor-associated antigen or a tumor-inhibiting or tumor-destroying activity but mediates such effect, in particular by recruiting effector mechanisms, in particular those having cell damaging potential, to a specific location, in particular a tumor or tumor cells.

[0033] Preferably, said cells expressing or abnormally expressing a tumor-associated nucleic acid and/or a tumor-associated antigen identified according to the invention are non-placenta cells.

[0034] The activity of a tumor-associated antigen identified according to the invention can be any activity of a protein or a peptide. In one embodiment this activity is an enzymatic activity.

[0035] According to the invention the phrase “inhibit expression or activity” includes a complete or essentially complete inhibition of expression or activity and a reduction in expression or activity.

[0036] The agent which, when administered, selectively increases the amount of complexes between an MHC molecule and a tumor-associated antigen identified according to the invention or a part thereof comprises one or more components selected from the group consisting of (i) the tumor-associated antigen or a part thereof, (ii) a nucleic acid which codes for said tumor-associated antigen or a part thereof, (iii) a host cell which expresses said tumor-associated antigen or a part thereof, and (iv) isolated complexes between peptide epitopes from said tumor-associated antigen and an MHC molecule.

[0037] The invention furthermore relates to a pharmaceutical composition which comprises one or more components selected from the group consisting of (i) a tumor-associated antigen identified according to the invention or a part thereof, (ii) a nucleic acid which codes for a tumor-associated antigen identified according to the invention or a part thereof, (iii) an antibody which binds to a tumor-associated antigen identified according to the invention or to a part thereof, (iv) an antisense nucleic acid which hybridizes specifically with a tumor-associated nucleic acid identified according to the invention/a nucleic acid coding for a tumor-associated antigen identified according to the invention, (v) an siRNA directed against a tumor-associated nucleic acid identified according to the invention/a nucleic acid coding for a tumor-associated antigen identified according to the invention, (vi) a host cell which expresses a tumor-associated antigen identified according to the invention or a part thereof, and (vii) isolated complexes between a tumor-associated antigen identified according to the invention or a part thereof and an MHC molecule.

[0038] In one embodiment, a nucleic acid coding for a tumor-associated antigen identified according to the invention or a part thereof is present in the pharmaceutical composition in an expression vector and functionally linked to a promoter. In a further embodiment, a nucleic acid coding for a tumor-associated antigen identified according to the invention or a part thereof is present in the pharmaceutical composition in a virus as further described below.

[0039] A host cell present in a pharmaceutical composition of the invention may secrete the tumor-associated antigen or the part thereof, may express it on the surface and preferably may additionally express an MHC molecule which binds to said tumor-associated antigen or said part thereof. In one embodiment, the host cell expresses the MHC molecule endogenously. In a further embodiment, the host cell expresses the MHC molecule and/or the tumor-associated antigen or the part thereof in a recombinant manner. The host cell is preferably nonproliferative. In a preferred embodiment, the host cell is an antigen-presenting cell, in particular a dendritic cell, a monocyte or a macrophage.

[0040] In a further embodiment, an antibody present in a pharmaceutical composition of the invention is a monoclonal antibody. In further embodiments, the antibody is a chimeric, human or humanized antibody, a fragment of an antibody or a synthetic antibody. The antibody may be coupled to a therapeutically or diagnostically useful agent also termed therapeutic or diagnostic agent or substance herein.

[0041] An antisense nucleic acid present in a pharmaceutical composition of the invention may comprise a sequence of 6-50, in particular 10-30, 15-30 and 20-30, contiguous nucleotides of the nucleic acid coding for the tumor-associated antigen identified according to the invention.

[0042] In further embodiments, a tumor-associated antigen or a part thereof, provided by a pharmaceutical composition of the invention either directly or via expression of a nucleic acid, binds to MHC molecules on the surface of cells, said binding preferably causing a cytolytic response and/or inducing cytokine release.

[0043] A pharmaceutical composition of the invention may comprise a pharmaceutically compatible carrier and/or an adjuvant.

[0044] A pharmaceutical composition of the invention is preferably used for the treatment or prevention of a disease characterized by selective expression or abnormal expression of a tumor-associated nucleic acid and/or tumor-associated antigen. In a preferred embodiment, the disease is a neoplastic disease, preferably cancer.

[0045] In a preferred embodiment, the pharmaceutical composition of the invention is in the form of a vaccine which may be used therapeutically or prophylactically. Such vaccine preferably comprises a tumor-associated antigen identified according to the invention or a part thereof, and/or a nucleic acid which codes for a tumor-associated antigen identified according to the invention or a part thereof. In particular embodiments, the nucleic acid is present in a virus or host cell.

[0046] The invention furthermore relates to methods of treating, preventing, diagnosing or monitoring, i.e. determining the regression, progression, course and/or onset of, a disease characterized by expression or abnormal expression of one of more tumor-associated nucleic acids identified according to the invention, preferably also resulting in expression or abnormal expression of one of more tumor-associated antigens identified according to the invention, preferably a neoplastic disease, in particular cancer. In one embodiment, the treatment or prevention comprises administering a pharmaceutical composition of the invention.

[0047] The methods of diagnosing and/or methods of monitoring according to the invention generally concern the detection of and/or determination of the quantity of one or more parameters selected from the group consisting of (i) a tumor-associated nucleic acid identified according to the invention, or a part thereof, (ii) a tumor-associated antigen identified according to the invention, or a part thereof, (iii) an antibody against a tumor-associated antigen identified according to the invention or a part thereof, and (iv) T lymphocytes, preferably cytotoxic or T helper lymphocytes, which are specific for a tumor-associated antigen identified according to the invention or a part thereof and/or a complex between the tumor-associated antigen or a part thereof and an MHC molecule, in a biological sample isolated from a patient, preferably from a patient having said disease, being suspected of having or falling ill with said disease or having a potential for said disease. Means for accomplishing said detection and/or determination of the quantity are described herein and will be apparent to the skilled person.

[0048] Preferably, the presence of said nucleic acid or said part thereof, said tumor-associated antigen or said part thereof, said antibody and/or said T lymphocytes and/or a quantity of said nucleic acid or said part thereof, said tumor-associated antigen or said part thereof, said antibody and/or said T lymphocytes which is increased compared to a patient and/or a tissue without said disease is indicative for the presence of said disease or a potential for a development of said disease.

[0049] The methods of diagnosing and/or monitoring of the invention also include embodiments wherein by detection or determination of the quantity of said nucleic acid or said part thereof, said tumor-associated antigen or said part thereof, said antibody and/or said T lymphocytes it is possible to assess and/or prognose the metastatic behavior of said disease, wherein, preferably, the presence of said nucleic acid or said part thereof, said tumor-associated antigen or said part thereof, said antibody and/or said T lymphocytes and/or a quantity of said nucleic acid or said part thereof, said tumor-associated antigen or said part thereof, said antibody and/or said T lymphocytes which is increased compared to a patient without said disease or without a metastasis of said disease is indicative for a metastatic behavior of said disease or a potential for a metastatic behavior of said disease.

[0050] In particular embodiments, said detection or determination of the quantity comprises (i) contacting a biological sample with an agent which binds specifically to said tumor-associated nucleic acid or said part thereof, to said tumor-associated antigen or said part thereof, to said antibody or to said T lymphocytes, and (ii) detecting the formation of or determining the amount of a complex between the agent and the nucleic acid or the part thereof, the tumor-associated antigen or the part thereof, the antibody, or the T lymphocytes.

[0051] In one embodiment, the disease is characterized by expression or abnormal expression of two or more different tumor-associated nucleic acids preferably also resulting in expression or abnormal expression of two or more different tumor-associated antigens and a detection or determination of the quantity comprises a detection or determination of the quantity of two or more different tumor-associated nucleic acids or of parts thereof, of two or more different tumor-associated antigens or of parts thereof, of two or more antibodies binding to said two or more different tumor-associated antigens or to parts thereof and/or of two or more T lymphocytes specific for said two or more different tumor-associated antigens or parts thereof, or complexes thereof with MHC molecules. In a further embodiment, the biological sample isolated from the patient is compared to a comparable normal biological sample.

[0052] The methods of monitoring according to the invention preferably comprise a detection of and/or determination of the quantity of one or more of the parameters mentioned above in a first sample at a first point in time and in a further sample at a second point in time, wherein the course of the disease is determined by comparing the two samples.

[0053] Preferably, a level of said nucleic acid or said part thereof, said tumor-associated antigen or said part thereof, said antibody and/or said T lymphocytes winch is increased in a sample compared to a sample taken earlier from a patient indicates that the patient has developed or is about to develop cancer and/or a metastasis of cancer and/or a relapse of cancer. Preferably, a level of said nucleic acid or said part thereof, said tumor-associated antigen or said part thereof, said antibody and/or said T lymphocytes which is decreased in a sample compared to a sample taken earlier from a patient indicates regression of cancer and/or a metastasis of cancer in said patient and thus, preferably indicates a successful cancer therapy.

[0054] According to the invention, detection of a nucleic acid or of a part thereof or determining the quantity of a nucleic acid or of a part thereof may be carried out using a oligo- or polynucleotide probe which hybridizes specifically to said nucleic acid or said part thereof or may be carried out by selective amplification of said nucleic acid or said part thereof, e.g. by means of PCR amplification. In one embodiment, the oligo- or polynucleotide probe comprises a sequence of 6-50, in particular 10-30, 15-30 and 20-30, contiguous nucleotides of said nucleic acid.

[0055] In particular embodiments, the tumor-associated antigen or the part thereof which is to be detected or the quantity of which is to be determined in the methods of the present invention is present intracellularly, on the cell surface or in a complex with an MHC molecule.

[0056] According to the invention, detection of a tumor-associated antigen or of a part thereof or determining the quantity of a tumor-associated antigen or of a part thereof may be carried out using an antibody binding specifically to said tumor-associated antigen or said part thereof.

[0057] According to the invention, detection of an antibody or determining the quantity of an antibody may be carried out using a protein or peptide binding specifically to said antibody.

[0058] According to the invention, detection of or determining the quantity of T lymphocytes which are specific for a tumor-associated antigen or a part thereof and/or a complex thereof with an MHC molecule may be carried out using a cell presenting the complex between said tumor-associated antigen or said part thereof and an MHC molecule. T lymphocytes may additionally be detected by detecting their proliferation, their cytokine production, and their cytotoxic activity triggered by specific stimulation with a complex of an MHC molecule and a tumor-associated antigen or a part thereof. T lymphocytes may also be detected with aid of a recombinant MHC molecule or a complex of two or more MHC molecules loaded with immunogenic fragments of one or more tumor-associated antigens.

[0059] An agent which is used for detection or determining the quantity in the methods of the invention such as a oligo- or polynucleotide probe, an antibody, a protein or peptide or a cell is preferably labeled in a detectable manner, in particular by a detectable marker such as a radioactive marker or an enzymic marker.

[0060] In a particular aspect, the invention relates to a method of treating, preventing, diagnosing or monitoring a disease characterized by expression or abnormal expression of a tumor-associated antigen identified according to the invention, which method comprises administering an antibody which binds to said tumor-associated antigen or to a part thereof and which is coupled to a therapeutic or diagnostic agent. The antibody may be a monoclonal antibody. In further embodiments, the antibody is a chimeric or humanized antibody or a fragment of an antibody.

[0061] In certain embodiments, the methods of the invention of diagnosing or monitoring a disease are performed with a biological sample containing or suspected of containing tumor cells such as disseminating tumor cells or metastatic tumor cells. Such biological samples include, for example, tissue, blood, serum, bone marrow, sputum, bronchial aspirate, and/or bronchial lavage. Preferably, the methods of the invention of diagnosing or monitoring a disease are performed with a biological sample not containing placental cells and, in particular, being a non-placenta biological sample isolated from a subject. In one embodiment, the biological sample is from a tissue or organ wherein the cells when the tissue or organ is free of tumors do not substantially express a tumor-associated antigen identified according to the invention and/or a tumor-associated nucleic acid identified according to the invention.

[0062] In one particular aspect, the invention relates to a method of treating a patient having a disease characterized by expression or abnormal expression of a tumor-associated antigen identified according to the invention, which method comprises (i) providing a sample containing immunoreactive cells, either obtained from said patient or from another individual of the same species, in particular a healthy individual, or an individual of a different species, (ii) contacting said sample with a host cell expressing said tumor-associated antigen or a part thereof, under conditions which favor production of cytolytic T cells against said tumor-associated antigen or a part thereof, and (iii) introducing the cytolytic T cells into the patient in an amount suitable for lysing cells expressing the tumor-associated antigen or a part thereof. In one embodiment, the method includes cloning of the T cell receptor of cytolytic T cells obtained and transferring the nucleic acid coding for the T cell receptor to T cells, either obtained from said patient or from another individual of the same species, in particular a healthy individual, or an individual of a different species, which T cells thus receive the desired specificity and, as under (iii), may be introduced into the patient.

[0063] In one embodiment, the host cell endogenously expresses an MHC molecule. In a further embodiment, the host cell recombinantly expresses an MHC molecule and/or the tumor-associated antigen or the part thereof. Preferably, the host cell presents the tumor-associated antigen or the part thereof by MHC molecules on its surface. The host cell is preferably nonproliferative. In a preferred embodiment, the host cell is an antigen-presenting cell, in particular a dendritic cell, a monocyte or a macrophage.

[0064] The invention also relates to a method of treating a disease characterized by expression or abnormal expression of a tumor-associated antigen identified according to the invention, which method comprises (i) identifying cells from the patient which express abnormal amounts of the tumor-associated antigen, (ii) isolating a sample of said cells, (iii) culturing said cells, and (iv) introducing said cells into the patient in an amount suitable for triggering an immune response to the cells.

[0065] The present invention furthermore relates to a nucleic acid selected from the group consisting of (a) a nucleic acid which comprises a nucleic acid sequence selected from the group consisting of SEQ ID NOs: 1-540, 541, 545, 549, 553, 557, 560, 563, 566, 570, 574, 577, 580, 583, 587, 591, 595, 599, 602, 606, 610, 613, 617, 620, 624, 634, 638, 642, 646, 649, 653, 656, 660, 664, 668, 671, 675, 679, 682, and 686, a part or derivative thereof, (b) a nucleic acid which hybridizes with the nucleic acid of (a) under stringent conditions, (c) a nucleic acid which is degenerate with respect to the nucleic acid of (a) or (b), and (d) a nucleic acid which is complementary to the nucleic acid of (a), (b) or (c).

[0066] In a further aspect, the invention relates to a recombinant nucleic acid molecule, in particular DNA or RNA molecule, which comprises a nucleic acid of the invention.

[0067] The invention also relates to host cells which contain a nucleic acid or recombinant nucleic acid molecule of the invention.

[0068] The host cell may also comprise a nucleic acid coding for a MHC molecule. In one embodiment, the host cell endogenously expresses the MHC molecule. In a further embodiment, the host cell recombinantly expresses the MHC molecule and/or the nucleic acid or recombinant nucleic acid molecule of the invention or a part thereof. Preferably, the host cell is nonproliferative. In a preferred embodiment, the host cell is an antigen-presenting cell, in particular a dendritic cell, a monocyte or a macrophage.

[0069] In a further embodiment, the invention relates to oligonucleotides which hybridize with a nucleic acid identified according to the invention and which may be used as genetic probes or as “antisense” molecules. Nucleic acid molecules in the form of oligonucleotide primers or competent probes, which hybridize with a nucleic acid identified according to the invention or parts thereof, may be used for detecting said nucleic acid and/or finding nucleic acids which are homologous to said nucleic acid identified according to the invention, e.g. by PCR amplification, Southern and Northern hybridization. Hybridization may be carried out under low stringency, more preferably under medium stringency and most preferably under high stringency conditions.

[0070] In a further aspect, the invention relates to a protein or peptide which is encoded by a nucleic acid selected from the group consisting of (a) a nucleic acid which comprises a nucleic acid sequence selected from the group consisting of SEQ ID NOs: 1-540, 541, 545, 549, 553, 557, 560, 563, 566, 570, 574, 577, 580, 583, 587, 591, 595, 599, 602, 606, 610, 613, 617, 620, 624, 634, 638, 642, 646, 649, 653, 656, 660, 664, 668, 671, 675, 679, 682, and 686, a part or derivative thereof, (b) a nucleic acid which hybridizes with the nucleic acid of (a) under stringent conditions, (c) a nucleic acid which is degenerate with respect to the nucleic acid of (a) or (b), and (d) a nucleic acid which is complementary to the nucleic acid of (a), (b) or (c). In a preferred embodiment, the protein or peptide comprises an amino acid sequence selected from the group consisting of SEQ ID NOs: 542, 546, 550, 554, 567, 571, 584, 588, 592, 596, 603, 607, 614, 621, 625, 635, 639, 643, 650, 657, 661, 665, 672, 676, and 683 of the sequence listing, a part or derivative thereof.

[0071] In a further aspect, the invention relates to an immunogenic fragment of a tumor-associated antigen identified according to the invention. Said fragment preferably binds to a MHC molecule or an antibody, preferably to a human HLA receptor or a human antibody. According to the invention, a part or fragment preferably comprises a sequence of at least 5, at least 6, in particular at least 8, at least 10, at least 12, at least 15, at least 20, at least 30 or at least 50, amino acids.

[0072] In a further aspect, the invention relates to an agent which binds to a tumor-associated antigen identified according to the invention or to a part thereof. In a preferred embodiment, the agent is a protein or peptide, in particular an antibody, a T cell receptor or an MHC molecule. In further embodiments, the antibody is a monoclonal, chimeric, human or humanized antibody, an antibody produced by combinatory techniques, or a fragment of an antibody. In one preferred embodiment, the invention relates to an antibody which binds selectively to a complex of (i) a tumor-associated antigen identified according to the invention or a part thereof and (ii) an MHC molecule to which said tumor-associated antigen identified according to the invention or said part thereof binds, with said antibody not binding to (i) or (ii) alone.

[0073] According to the invention, the term “binding” preferably relates to a specific binding. “Specific binding” means that an agent such as an antibody binds stronger to a target such as an epitope for which it is specific compared to the binding to another target. An agent binds stronger to a first target compared to a second target if it binds to the first target with a dissociation constant (K_{D}) which is lower than the dissociation constant for the second target. Preferably the dissociation constant (K_{D}) for the target to which the agent binds specifically is more than 10-fold, preferably more than 20-fold, more preferably more than 50-fold, even more preferably more than 100-fold, 200-fold, 500-fold or 1000-fold lower than the dissociation constant (K_{D}) for the target to which the agent does not bind specifically.

[0074] Such specific antibodies may, for example, be obtained by immunization using the aforementioned peptides.

[0075] The invention furthermore relates to a conjugate between an agent of the invention which binds to a tumor-associated antigen identified according to the invention or to a part thereof or an antibody of the invention and a therapeutic or diagnostic agent. In one embodiment, the therapeutic or diagnostic agent is a toxin.

[0076] In a further aspect, the invention relates to a kit for detecting a disease characterized by expression or abnormal expression of one of more tumor-associated nucleic acids identified according to the invention, preferably also resulting in expression or abnormal expression of one of more tumor-associated antigens identified according to the invention, preferably a neoplastic disease, in particular cancer, which kit comprises agents for detection or determining the quantity (i) of the tumor-associated nucleic acid or of a part thereof, (ii) of the tumor-associated antigen or of a part thereof, (iii) of antibodies which bind to the tumor-associated antigen or to a part thereof, and/or (iv) of T cells which are specific for the tumor-associated antigen or a part thereof or a complex thereof with an MHC molecule. Such agents are described herein above.

### DETAILED DESCRIPTION OF THE INVENTION

[0077] A reference herein to a range of numerical values is to be understood so as to specify and mention each of the individual numerical values comprised by said range. For example, a reference to SEQ ID NOs: 1-540 is to be understood so as to refer to each and every of the following individual SEQ ID NOs: 1, 2, 3, 4, 5, 6, 7, 8, 9, 10, 11, 12, 13, 14, 15, 16, 17, 18, 19, 20, 21, 22, 23, 24, 25, 26, 27, 28, 29, 30, 31, 32, 33, 34, 35, 36, 37, 38, 39, 40, 41, 42, 43, 44, 45, 46, 47, 48, 49, 50, 51, 52, 53, 54, 55, 56, 57, 58, 59, 60, 61, 62, 63, 64, 65, 66, 67, 68, 69, 70, 71, 72, 73, 74, 75, 76, 77, 78, 79, 80, 81, 82, 83, 84, 85, 86, 87, 88, 89, 90, 91, 92, 93, 94, 95, 96, 97, 98, 99, 100, 101, 102, 103, 104, 105, 106, 107, 108, 109, 110, 111, 112, 113, 114, 115, 116, 117, 118, 119, 120, 121, 122, 123, 124, 125, 126, 127, 128, 129, 130, 131, 132, 133, 134, 135, 136, 137, 138, 139, 140, 141, 142, 143, 144, 145, 146, 147, 148, 149, 150, 151, 152, 153, 154, 155, 156, 157, 158, 159, 160, 161, 162, 163, 164, 165, 166, 167, 168, 169, 170, 171, 172, 173, 174, 175, 176, 177, 178, 179, 180, 181, 182, 183, 184, 185, 186, 187, 188, 189, 190, 191, 192, 193, 194, 195, 196, 197, 198, 199, 200, 201, 202, 203, 204, 205, 206, 207, 208, 209, 210, 211, 212, 213, 214, 215, 216, 217, 218, 219, 220, 221, 222, 223, 224, 225, 226, 227, 228, 229, 230, 231, 232, 233, 234, 235, 236, 237, 238, 239, 240, 241, 242, 243, 244, 245, 246, 247, 248, 249, 250, 251, 252, 253, 254, 255, 256, 257, 258, 259, 260, 261, 262, 263, 264, 265, 266, 267, 268, 269, 270, 271, 272, 273, 274, 275, 276, 277, 278, 279, 280, 281, 282, 283, 284, 285, 286, 287, 288, 289, 290, 291, 292, 293, 294, 295, 296, 297, 298, 299, 300, 301, 302, 303, 304, 305, 306, 307, 308, 309, 310, 311, 312, 313, 314, 315, 316, 317, 318, 319, 320, 321, 322, 323, 324, 325, 326, 327, 328, 329, 330, 331, 332, 333, 334, 335, 336, 337, 338, 339, 340, 341, 342, 343, 344, 345, 346, 347, 348, 349, 350, 351, 352, 353, 354, 355, 356, 357, 358, 359, 360, 361, 362, 363, 364, 365, 366, 367, 368, 369, 370, 371, 372, 373, 374, 375, 376, 377, 378, 379, 380, 381, 382, 383, 384, 385, 386, 387, 388, 389, 390, 391, 392, 393, 394, 395, 396, 397, 398, 399, 400, 401, 402, 403, 404, 405, 406, 407, 408, 409, 410, 411, 412, 413, 414, 415, 416, 417, 418, 419, 420, 421, 422, 423, 424, 425, 426, 427, 428, 429, 430, 431, 432, 433, 434, 435, 436, 437, 438, 439, 440, 441, 442, 443, 444, 445, 446, 447, 448, 449, 450, 451, 452, 453, 454, 455, 456, 457, 458, 459, 460, 461, 462, 463, 464, 465, 466, 467, 468, 469, 470, 471, 472, 473, 474, 475, 476, 477, 478, 479, 480, 481, 482, 483, 484, 485, 486, 487, 488, 489, 490, 491, 492, 493, 494, 495, 496, 497, 498, 499, 500, 501, 502, 503, 504, 505, 506, 507, 508, 509, 510, 511, 512, 513, 514, 515, 516, 517, 518, 519, 520, 521, 522, 523, 524, 525, 526, 527, 528, 529, 530, 531, 532, 533, 534, 535, 536, 537, 538, 539, and 540.

[0078] According to the invention, a “reference” such as a reference sample or reference organism may be used to correlate and compare the results obtained in the methods of the invention from a test sample or test organism, i.e. a patient. Typically the reference sample is a sample from a healthy tissue, in particular a corresponding tissue which is not affected by cancer, or the reference organism is a healthy organism, in particular an organism which does not suffer from cancer.

[0079] A “reference value” can be determined from a reference empirically by measuring a sufficiently large number of references. Preferably the reference value is determined by measuring at least 2, preferably at least 3, preferably at least 5, preferably at least 8, preferably at least 12, preferably at least 20, preferably at least 30, preferably at least 50, or preferably at least 100 references.

[0080] According to the invention, a nucleic acid is preferably deoxyribonucleic acid (DNA) or ribonucleic acid (RNA). Nucleic acids comprise according to the invention genomic DNA, cDNA, mRNA, recombinantly produced and chemically synthesized molecules. According to the invention, a nucleic acid may be present as a single-stranded or double-stranded and linear or covalently circularly closed molecule.

[0081] The terms “tumor-associated nucleic acid identified according to the invention” and “nucleic acid encoding a tumor-associated antigen identified according to the invention” have similar meanings. However, the different terms are used herein to account for the fact that in some embodiments only the expression of nucleic acid, in particular mRNA, is of relevance while the expression of protein is not a critical factor.

[0082] As used herein, the term “RNA” means a molecule comprising at least one ribonucleotide residue. By “ribonucleotide” is meant a nucleotide with a hydroxyl group at the 2′-position of a beta-D-ribo-furanose moiety. The term includes double stranded RNA, single stranded RNA, isolated RNA such as partially purified RNA, essentially pure RNA, synthetic RNA, recombinantly produced RNA, as well as altered RNA that differs from naturally occurring RNA by the addition, deletion, substitution and/or alteration of one or more nucleotides. Such alterations can include addition of non-nucleotide material, such as to the end(s) of a RNA or internally, for example at one or more nucleotides of the RNA. Nucleotides in RNA molecules can also comprise non-standard nucleotides, such as non-naturally occurring nucleotides or chemically synthesized nucleotides or deoxynucleotides. These altered RNAs can be referred to as analogs or analogs of naturally-occurring RNA.

[0083] If reference is made herein to the detection of or the determination of the quantity of a nucleic acid, the nucleic acid which is actually to be detected or the quantity of which is actually to be determined is preferably mRNA. However, it should be understood that this may also include embodiments wherein mRNA is detected or the quantity of mRNA is determined indirectly. For example, mRNA may be transformed into cDNA and the cDNA detected or its quantity determined. mRNA is given herein as the cDNA equivalent. One skilled in the art would understand that the cDNA sequence is equivalent to the mRNA sequence, and can be used for the same purpose herein, e.g., the generation of probes hybridizing to the nucleic acid to be detected. Thus, if reference is made herein to the sequences shown in the sequence listing this is also to include the RNA equivalents of said sequences.

[0084] The nucleic acids described according to the invention have preferably been isolated. The term “isolated nucleic acid” means according to the invention that the nucleic acid was (i) amplified in vitro, for example by polymerase chain reaction (PCR), (ii) recombinantly produced by cloning, (iii) purified, for example by cleavage and gel-electrophoretic fractionation, or (iv) synthesized, for example by chemical synthesis. An isolated nucleic acid is a nucleic acid which is available for manipulation by recombinant DNA techniques.

[0085] A degenerate nucleic acid according to the invention is a nucleic acid that differs from a reference nucleic acid in codon sequence due to the degeneracy of the genetic code.

[0086] The term “derivative” with respect to, for example, nucleic acid and amino acid sequences, according to the invention includes any variants, in particular mutants, splice variants, conformations, isoforms, allelic variants, species variants and species homologs, in particular those which are naturally present. An allelic variant relates to an alteration in the normal sequence of a gene, the significance of which is often unclear. Complete gene sequencing often identifies numerous allelic variants for a given gene. A species homolog is a nucleic acid or amino acid sequence with a different species of origin from that of a given nucleic acid or amino acid sequence.

[0087] A “derivative” of a nucleic acid according to the invention also includes nucleic acids comprising single or multiple such as at least 2, at least 4, or at least 6 and preferably up to 3, up to 4, up to 5, up to 6, up to 10, up to 15, or up to 20 nucleotide substitutions, deletions and/or additions. Furthermore, the term “derivative” also comprises chemical derivatization of a nucleic acid on a nucleotide base, on the sugar or on the phosphate. The term “derivative” also comprises nucleic acids which contain nucleotides and nucleotide analogs not occurring naturally. Preferably, a derivatization of a nucleic acid increases its stability.

[0088] Preferably the degree of identity between a specific nucleic acid sequence described herein and a nucleic acid sequence which is a derivative of said specific nucleic acid sequence, which hybridizes with said specific nucleic acid sequence and/or which is degenerate with respect to said specific nucleic acid sequence will be at least 70%, preferably at least 75%, preferably at least 80%, more preferably at least 85%, even more preferably at least 90% or most preferably at least 95%, 96%, 97%, 98% or 99%. The degree of identity is preferably given for a region of at least about 30, at least about 50, at least about 70, at least about 90, at least about 100, at least about 150, at least about 200, at least about 250, at least about 300, or at least about 400 nucleotides. In preferred embodiments, the degree of identity is given for the entire length of the reference nucleic acid sequence, such as the nucleic acid sequences given in the sequence listing.

[0089] A nucleic acid is “complementary” to another nucleic acid if the two sequences are capable of hybridizing and forming a stable duplex with one another, with hybridization preferably being carried out under conditions which allow specific hybridization between polynucleotides (stringent conditions). Stringent conditions are described, for example, in Molecular Cloning: A Laboratory Manual, J. Sambrook et al., Editors, 2nd Edition, Cold Spring Harbor Laboratory press, Cold Spring Harbor, N.Y., 1989 or Current Protocols in Molecular Biology, F. M. Ausubel et al., Editors, John Wiley & Sons, Inc., New York and refer, for example, to hybridization at 65° C. in hybridization buffer (3.5×SSC, 0.02% Ficoll, 0.02% polyvinylpyrrolidone, 0.02% bovine serum albumin, 2.5 mM NaH₂PO₄ (pH 7), 0.5% SDS, 2 mM EDTA). SSC is 0.15 M sodium chloride/0.15 M sodium citrate, pH 7. After hybridization, the membrane to which the DNA has been transferred is washed, for example, in 2×SSC at room temperature and then in 0.1-0.5×SSC/0.1×SDS at temperatures of up to 68° C.

[0090] A percent complementarity indicates the percentage of contiguous residues in a nucleic acid molecule that can form hydrogen bonds (e.g., Watson-Crick base pairing) with a second nucleic acid sequence (e.g., 5, 6, 7, 8, 9, 10 out of 10 being 50%, 60%, 70%, 80%, 90%, and 100% complementary). “Perfectly complementary” or “fully complementary” means that all the contiguous residues of a nucleic acid sequence will hydrogen bond with the same number of contiguous residues in a second nucleic acid sequence. Preferably, the degree of complementarity according to the invention is at least 70%, preferably at least 75%, preferably at least 80%, more preferably at least 85%, even more preferably at least 90% or most preferably at least 95%, 96%, 97%, 98% or 99%. Most preferably, the degree of complementarity according to the invention is 100%.

[0091] “Sequence similarity” indicates the percentage of amino acids that either are identical or that represent conservative amino acid substitutions. “Sequence identity” between two polypeptide or nucleic acid sequences indicates the percentage of amino acids or nucleotides that are identical between the sequences.

[0092] The term “percentage identity” is intended to denote a percentage of nucleotides or of amino acid residues which are identical between the two sequences to be compared, obtained after the best alignment, this percentage being purely statistical and the differences between the two sequences being distributed randomly and over their entire length. Sequence comparisons between two nucleotide or amino acid sequences are conventionally carried out by comparing these sequences after having aligned them optimally, said comparison being carried out by segment or by “window of comparison” in order to identify and compare local regions of sequence similarity. The optimal alignment of the sequences for comparison may be produced, besides manually, by means of the local homology algorithm of Smith and Waterman, 1981, Ads App. Math. 2, 482, by means of the local homology algorithm of Neddleman and Wunsch, 1970, J. Mol. Biol. 48, 443, by means of the similarity search method of Pearson and Lipman, 1988, Proc. Natl. Acad. Sci. USA 85, 2444, or by means of computer programs which use these algorithms (GAP, BESTFIT, FASTA, BLAST P, BLAST N and TFASTA in Wisconsin Genetics Software Package, Genetics Computer Group, 575 Science Drive, Madison, Wis.).

[0093] The percentage identity is calculated by determining the number of identical positions between the two sequences being compared, dividing this number by the number of positions compared and multiplying the result obtained by 100 so as to obtain the percentage identity between these two sequences.

[0094] In one embodiment, a nucleic acid sequence which is a derivative of a specific nucleic acid sequence, which is degenerate with respect to a specific nucleic acid sequence or which is a part of a specific nucleic acid sequence has a relevant function and/or activity of the specific nucleic acid sequence, i.e. it may encode a protein or peptide having the same activity or immunological properties as the protein or peptide encoded by the specific nucleic acid sequence and, in one embodiment, encodes the same protein or peptide.

[0095] Nucleic acids coding for tumor-associated antigens may, according to the invention, be present alone or in combination with other nucleic acids, in particular heterologous nucleic acids. Preferably, a nucleic acid coding for a tumor-associated antigen or a part thereof expresses said tumor-associated antigen or part thereof. In preferred embodiments, a nucleic acid is functionally linked to expression control sequences or regulatory sequences which may be homologous or heterologous with respect to said nucleic acid. A coding sequence and a regulatory sequence are “functionally” linked to one another, if they are covalently linked to one another in such a way that expression or transcription of said coding sequence is under the control or under the influence of said regulatory sequence. If the coding sequence is to be translated into a functional protein, then, with a regulatory sequence functionally linked to said coding sequence, induction of said regulatory sequence results in transcription of said coding sequence, without causing a frame shift in the coding sequence or said coding sequence not being capable of being translated into the desired protein or peptide.

[0096] The term “expression control sequence” or “regulatory sequence” comprises according to the invention promoters, enhancers and other control elements which regulate expression of a gene. In particular embodiments of the invention, the expression control sequences can be regulated. The exact structure of regulatory sequences may vary as a function of the species or cell type, but generally comprises 5′ untranscribed and 5′ untranslated sequences which are involved in initiation of transcription and translation, respectively, such as TATA box, capping sequence, CAAT sequence, and the like. More specifically, 5′ untranscribed regulatory sequences comprise a promoter region which includes a promoter sequence for transcriptional control of the functionally linked gene. Regulatory sequences may also comprise enhancer sequences or upstream activator sequences.

[0097] According to the invention, a nucleic acid may furthermore be present in combination with another nucleic acid which codes for a peptide controlling secretion of the protein or peptide encoded by said nucleic acid from a host cell. According to the invention, a nucleic acid may also be present in combination with another nucleic acid which codes for a peptide causing the encoded protein or peptide to be anchored on the cell membrane of the host cell or compartmentalized into particular organelles of said cell. Similarly, a combination with a nucleic acid is possible which represents a reporter gene or any “tag”.

[0098] In a preferred embodiment, a recombinant nucleic acid molecule is according to the invention a vector, where appropriate with a promoter, which controls expression of a nucleic acid, for example a nucleic acid coding for a tumor-associated antigen identified according to the invention. The term “vector” is used here in its most general meaning and comprises any intermediary vehicle for a nucleic acid which enables said nucleic acid, for example, to be introduced into prokaryotic and/or eukaryotic cells and, where appropriate, to be integrated into a genome. Vectors of this kind are preferably replicated and/or expressed in the cells. An intermediary vehicle may be adapted, for example, to the use in electroporation, in bombardment with microprojectiles, in liposomal administration, in the transfer with the aid of agrobacteria or in insertion via DNA or RNA viruses. Vectors comprise plasmids, phagemids, bacteriophages or viral genomes.

[0099] The nucleic acids coding for a tumor-associated antigen identified according to the invention may be used for transfection of host cells. Nucleic acids here mean both recombinant DNA and RNA. Recombinant RNA may be prepared by in-vitro transcription of a DNA template. Furthermore, it may be modified by stabilizing sequences, capping and polyadenylation prior to application.

[0100] According to the invention, the term “host cell” relates to any cell which can be transformed or transfected with an exogenous nucleic acid. The term “host cells” comprises according to the invention prokaryotic (e.g. E. coli) or eukaryotic cells (e.g. dendritic cells, B cells, CHO cells, COS cells, K562 cells, yeast cells and insect cells). Particular preference is given to mammalian cells such as cells from humans, mice, hamsters, pigs, goats, primates. The cells may be derived from a multiplicity of tissue types and comprise primary cells and cell lines. Specific examples comprise keratinocytes, peripheral blood leukocytes, stem cells of the bone marrow and embryonic stem cells. In further embodiments, the host cell is an antigen-presenting cell, in particular a dendritic cell, monocyte or a macrophage. A nucleic acid may be present in the host cell in the form of a single copy or of two or more copies and, in one embodiment, is expressed in the host cell.

[0101] According to the invention, the term “expression” is used in its most general meaning and comprises the production of RNA or of RNA and protein. It also comprises partial expression of nucleic acids. Furthermore, expression may be carried out transiently or stably. Preferred expression systems in mammalian cells comprise pcDNA3.1 and pRc/CMV (Invitrogen, Carlsbad, Calif.), which contain a selectable marker such as a gene imparting resistance to G418 (and thus enabling stably transfected cell lines to be selected) and the enhancer-promoter sequences of cytomegalovirus (CMV).

[0102] In those cases of the invention in which a MHC molecule presents a tumor-associated antigen or a part thereof, an expression vector may also comprise a nucleic acid sequence coding for said MHC molecule. The nucleic acid sequence coding for the MHC molecule may be present on the same expression vector as the nucleic acid coding for the tumor-associated antigen or the part thereof, or both nucleic acids may be present on different expression vectors. In the latter case, the two expression vectors may be cotransfected into a cell. If a host cell expresses neither the tumor-associated antigen or the part thereof nor the MHC molecule, both nucleic acids coding therefor may be transfected into the cell either on the same expression vector or on different expression vectors. If the cell already expresses the MHC molecule, only the nucleic acid sequence coding for the tumor-associated antigen or the part thereof can be transfected into the cell.

[0103] The invention also comprises kits for detection and/or determination of the quantity of nucleic acids. Such kits comprise, for example, a pair of amplification primers which hybridize to the nucleic acid which is to be detected or the amount of which is to be determined. The primers preferably comprise a sequence of 6-50, in particular 10-30, 15-30 and 20-30 contiguous nucleotides of the nucleic acid and are nonoverlapping, in order to avoid the formation of primer dimers. One of the primers will hybridize to one strand of the nucleic acid, and the other primer will hybridize to the complementary strand in an arrangement which allows amplification of the nucleic acid.

[0104] “Antisense molecules” or “antisense nucleic acids” may be used for regulating, in particular reducing, expression of a nucleic acid. The term “antisense molecule” or “antisense nucleic acid” refers according to the invention to an oligonucleotide which is an oligoribonucleotide, oligodeoxyribonucleotide, modified oligoribonucleotide or modified oligodeoxyribonucleotide and which hybridizes under physiological conditions to DNA comprising a particular gene or to mRNA of said gene, thereby inhibiting transcription of said gene and/or translation of said mRNA. According to the invention, an “antisense molecule” also comprises a construct which contains a nucleic acid or a part thereof in reverse orientation with respect to its natural promoter. An antisense transcript of a nucleic acid or of a part thereof may form a duplex with naturally occurring mRNA and thus prevent accumulation of or translation of the mRNA. Another possibility is the use of ribozymes for inactivating a nucleic acid.

[0105] Antisense oligonucleotides preferred according to the invention have a sequence of 6-50, in particular 10-30, 15-30 and 20-30, contiguous nucleotides of the target nucleic acid and preferably are fully complementary to the target nucleic acid or to a part thereof.

[0106] In preferred embodiments, the antisense oligonucleotide hybridizes with an N-terminal or 5′ upstream site such as a translation initiation site, transcription initiation site or promoter site. In further embodiments, the antisense oligonucleotide hybridizes with a 3′ untranslated region or mRNA splicing site.

[0107] In one embodiment, an oligonucleotide of the invention consists of ribonucleotides, deoxyribonucleotides or a combination thereof, with the 5′ end of one nucleotide and the 3′ end of another nucleotide being linked to one another by a phosphodiester bond. These oligonucleotides may be synthesized in the conventional manner or produced recombinantly.

[0108] In preferred embodiments, an oligonucleotide of the invention is a “modified” oligonucleotide. Here, the oligonucleotide may be modified in very different ways, without impairing its ability to bind its target, in order to increase, for example, its stability or therapeutic efficacy. According to the invention, the term “modified oligonucleotide” means an oligonucleotide in which (i) at least two of its nucleotides are linked to one another by a synthetic internucleoside bond (i.e. an internucleoside bond which is not a phosphodiester bond) and/or (ii) a chemical group which is usually not found in nucleic acids is covalently linked to the oligonucleotide. Preferred synthetic internucleoside bonds are phosphorothioates, alkyl phosphonates, phosphorodithioates, phosphate esters, alkyl phosphonothioates, phosphoramidates, carbamates, carbonates, phosphate triesters, acetamidates, carboxymethyl esters and peptides.

[0109] The term “modified oligonucleotide” also comprises oligonucleotides having a covalently modified base and/or sugar. “Modified oligonucleotides” comprise, for example, oligonucleotides with sugar residues which are covalently bound to low molecular weight organic groups other than a hydroxyl group at the 3′ position and a phosphate group at the 5′ position. Modified oligonucleotides may comprise, for example, a 2′-O-alkylated ribose residue or another sugar instead of ribose, such as arabinose.

[0110] It is to be understood that all embodiments described above with respect to oligonucleotides may also apply to polynucleotides.

[0111] By “small interfering RNA” or “siRNA” as used herein is meant an isolated RNA molecule, preferably greater than 10 nucleotides in length, more preferably greater than 15 nucleotides in length, and most preferably 18, 19, 20, 21, 22, 23, 24, 25, 26, 27, 28, 29, or 30 nucleotides in length that is used to identify a target gene or mRNA to be degraded. A range of 19-25 nucleotides is the most preferred size for siRNAs.

[0112] siRNA according to the invention can comprise partially purified RNA, substantially pure RNA, synthetic RNA, or recombinantly produced RNA, as well as altered RNA that differs from naturally-occurring RNA by the addition, deletion, substitution and/or alteration of one or more nucleotides. Such alterations can include addition of non-nucleotide material, such as to the end(s) of the siRNA or to one or more internal nucleotides of the siRNA; modifications that make the siRNA resistant to nuclease digestion (e.g., the use of 2′-substituted ribonucleotides or modifications to the sugar-phosphate backbone); or the substitution of one or more nucleotides in the siRNA with deoxyribonucleotides. Furthermore, siRNA may be modified to increase the stability thereof as described above for modified oligonucleotides, in particular by introducing one or more phosphorothioate linkages.

[0113] One or both strands of the siRNA can also comprise a 3′-overhang. As used herein, a “3′-overhang” refers to at least one unpaired nucleotide extending from the 3′-end of an RNA strand. Thus in one embodiment, the siRNA comprises at least one 3′-overhang of from 1 to about 6 nucleotides (which includes ribonucleotides or deoxynucleotides) in length, preferably from 1 to about 5 nucleotides in length, more preferably from 1 to about 4 nucleotides in length, and particularly preferably from about 2 to about 4 nucleotides in length. In the embodiment in which both strands of the siRNA molecule comprise a 3′-overhang, the length of the overhangs can be the same or different for each strand. In a most preferred embodiment, the 3′-overhang is present on both strands of the siRNA, and is 2 nucleotides in length. For example, each strand of the siRNA of the invention can comprise 3′-overhangs of dideoxythymidylic acid (“TT”) or diuridylic acid (“uu”).

[0114] In order to enhance the stability of the siRNA, the 3′-overhangs can be also stabilized against degradation. In one embodiment, the overhangs are stabilized by including purine nucleotides, such as adenosine or guanosine nucleotides. Alternatively, substitution of pyrimidine nucleotides by modified analogues, e.g., substitution of uridine nucleotides in the 3′-overhangs with 2′-deoxythymidine, is tolerated and does not affect the efficiency of RNAi degradation. In particular, the absence of a 2′-hydroxyl in the 2′-deoxythymidine significantly enhances the nuclease resistance of the 3′-overhang in tissue culture medium.

[0115] The sense and antisense strands of the siRNA can comprise two complementary, single-stranded RNA molecules or can comprise a single molecule in which two complementary portions are base-paired and are covalently linked by a single-stranded “hairpin” area. That is, the sense region and antisense region can be covalently connected via a linker molecule. The linker molecule can be a polynucleotide or non-nucleotide linker. Without wishing to be bound by any theory, it is believed that the hairpin area of the latter type of siRNA molecule is cleaved intracellularly by the “Dicer” protein (or its equivalent) to form a siRNA of two individual base-paired RNA molecules.

[0116] As used herein, “target mRNA” refers to an RNA molecule that is a target for downregulation.

[0117] siRNA can be expressed from pol III expression vectors without a change in targeting site, as expression of RNAs from pol III promoters is only believed to be efficient when the first transcribed nucleotide is a purine.

[0118] siRNA according to the invention can be targeted to any stretch of approximately 19-25 contiguous nucleotides in any of the target mRNA sequences (the “target sequence”). Techniques for selecting target sequences for siRNA are given, for example, in Tuschl T. et al., “The siRNA User Guide”, revised Oct. 11, 2002, the entire disclosure of which is herein incorporated by reference. “The siRNA User Guide” is available on the world wide web at a website maintained by Dr. Thomas Tuschl, Laboratory of RNA Molecular Biology, Rockefeller University, New York, USA, and can be found by accessing the website of the Rockefeller University and searching with the keyword “siRNA”. Thus, the sense strand of the present siRNA comprises a nucleotide sequence substantially identical to any contiguous stretch of about 19 to about 25 nucleotides in the target mRNA.

[0119] Generally, a target sequence on the target mRNA can be selected from a given cDNA sequence corresponding to the target mRNA, preferably beginning 50 to 100 nt downstream (i.e., in the 3′-direction) from the start codon. The target sequence can, however, be located in the 5′- or 3′-untranslated regions, or in the region nearby the start codon.

[0120] siRNA can be obtained using a number of techniques known to those of skill in the art. For example, siRNA can be chemically synthesized or recombinantly produced using methods known in the art, such as the Drosophila in vitro system described in U.S. published application 2002/0086356 of Tuschl et al., the entire disclosure of which is herein incorporated by reference.

[0121] Preferably, siRNA is chemically synthesized using appropriately protected ribonucleoside phosphoramidites and a conventional DNA/RNA synthesizer. siRNA can be synthesized as two separate, complementary RNA molecules, or as a single RNA molecule with two complementary regions.

[0122] Alternatively, siRNA can also be expressed from recombinant circular or linear DNA plasmids using any suitable promoter. Such embodiments are included according to the present invention when reference is made herein to the administration of siRNA or the incorporation of siRNA into pharmaceutical compositions. Suitable promoters for expressing siRNA of the invention from a plasmid include, for example, the U6 or H1 RNA pol III promoter sequences and the cytomegalovirus promoter.

[0123] Selection of other suitable promoters is within the skill in the art. The recombinant plasmids of the invention can also comprise inducible or regulatable promoters for expression of the siRNA in a particular tissue or in a particular intracellular environment.

[0124] The siRNA expressed from recombinant plasmids can either be isolated from cultured cell expression systems by standard techniques, or can be expressed intracellularly. The use of recombinant plasmids to deliver siRNA to cells in vivo is discussed in more detail below. siRNA can be expressed from a recombinant plasmid either as two separate, complementary RNA molecules, or as a single RNA molecule with two complementary regions.

[0125] Selection of plasmids suitable for expressing siRNA, methods for inserting nucleic acid sequences for expressing the siRNA into the plasmid, and methods of delivering the recombinant plasmid to the cells of interest are within the skill in the art.

[0126] siRNA can also be expressed from recombinant viral vectors intracellularly in vivo. The recombinant viral vectors comprise sequences encoding the siRNA and any suitable promoter for expressing the siRNA sequences. The recombinant viral vectors can also comprise inducible or regulatable promoters for expression of the siRNA in a particular tissue or in a particular intracellular environment. siRNA can be expressed from a recombinant viral vector either as two separate, complementary RNA molecules, or as a single RNA molecule with two complementary regions.

[0127] The term “peptide” comprises oligo- and polypeptides and refers to substances comprising two or more, preferably 3 or more, preferably 4 or more, preferably 6 or more, preferably 8 or more, preferably 10 or more, preferably 13 or more, preferably 16 more, preferably 21 or more and up to preferably 8, 10, 20, 30, 40 or 50, in particular 100 amino acids joined covalently by peptide bonds. The term “protein” refers to large peptides, preferably to peptides with more than 100 amino acid residues, but in general the terms “peptides” and “proteins” are synonyms and are used interchangeably herein.

[0128] Preferably, the proteins and peptides described according to the invention have been isolated. The terms “isolated protein” or “isolated peptide” mean that the protein or peptide has been separated from its natural environment. An isolated protein or peptide may be in an essentially purified state. The term “essentially purified” means that the protein or peptide is essentially free of other substances with which it is associated in nature or in vivo.

[0129] Such proteins and peptides may be used, for example, in producing antibodies and in an immunological or diagnostic assay or as therapeutics. Proteins and peptides described according to the invention may be isolated from biological samples such as tissue or cell homogenates and may also be expressed recombinantly in a multiplicity of pro- or eukaryotic expression systems.

[0130] For the purposes of the present invention, “derivatives” of a protein or peptide or of an amino acid sequence comprise amino acid insertion variants, amino acid deletion variants and/or amino acid substitution variants.

[0131] Amino acid insertion variants comprise amino- and/or carboxy-terminal fusions and also insertions of single or two or more amino acids in a particular amino acid sequence. In the case of amino acid sequence variants having an insertion, one or more amino acid residues are inserted into a particular site in an amino acid sequence, although random insertion with appropriate screening of the resulting product is also possible.

[0132] Amino acid deletion variants are characterized by the removal of one or more amino acids from the sequence.

[0133] Amino acid substitution variants are characterized by at least one residue in the sequence being removed and another residue being inserted in its place. Preference is given to the modifications being in positions in the amino acid sequence which are not conserved between homologous proteins or peptides and/or to replacing amino acids with other ones having similar properties.

[0134] “Conservative substitutions” may be made, for instance, on the basis of similarity in polarity, charge, solubility, hydrophobicity, hydrophilicity, and/or the amphipathic nature of the residues involved. For example: (a) nonpolar (hydrophobic) amino acids include alanine, leucine, isoleucine, valine, proline, phenylalanine, tryptophan, and methionine; (b) polar neutral amino acids include glycine, serine, threonine, cysteine, tyrosine, asparagine, and glutamine; (c) positively charged (basic) amino acids include arginine, lysine, and histidine; and (d) negatively charged (acidic) amino acids include aspartic acid and glutamic acid. Substitutions typically may be made within groups (a)-(d). In addition, glycine and proline may be substituted for one another based on their ability to disrupt α-helices. Some preferred substitutions may be made among the following groups: (i) S and T; (ii) P and G; and (iii) A, V, L and I. Given the known genetic code, and recombinant and synthetic DNA techniques, the skilled scientist readily can construct DNAs encoding the conservative amino acid variants.

[0135] Preferably the degree of similarity, preferably identity between a specific amino acid sequence described herein and an amino acid sequence which is a derivative of said specific amino acid sequence will be at least 70%, preferably at least 80%, preferably at least 85%, even more preferably at least 90% or most preferably at least 95%, 96%, 97%, 98% or 99%. The degree of similarity or identity is given preferably for a region of at least about 20, at least about 40, at least about 60, at least about 80, at least about 100, at least about 120, at least about 140, at least about 160, at least about 200 or 250 amino acids. In preferred embodiments, the degree of similarity or identity is given for the entire length of the reference amino acid sequence.

[0136] The amino acid variants described above may be readily prepared with the aid of known peptide synthesis techniques such as, for example, by solid phase synthesis (Merrifield, 1964) and similar methods or by recombinant DNA manipulation. The manipulation of DNA sequences for preparing proteins and peptides having substitutions, insertions or deletions, is described in detail in Sambrook et al. (1989), for example.

[0137] According to the invention, “derivatives” of proteins and peptides include modified forms of proteins and peptides. Such modifications include any chemical modification and comprise single or multiple substitutions, deletions and/or additions of any molecules associated with the protein or peptide, such as carbohydrates, lipids and/or proteins or peptides. The term “derivative” also extends to all functional chemical equivalents of said proteins and peptides.

[0138] According to the invention, a part or fragment or derivative of a protein, peptide or nucleic acid, e.g. of a tumor-associated antigen or tumor-associated nucleic acid, preferably has a functional property of the protein, peptide or nucleic acid from which it has been derived. Such functional properties comprise the interaction with antibodies, the interaction with other peptides or proteins, the selective binding of nucleic acids and an enzymatic activity. In one embodiment, a part or fragment or derivative of a protein, peptide or nucleic acid is immunologically equivalent to the protein, peptide or nucleic acid from which it has been derived. In one embodiment, the functional property is an immunological property. A particular property is the ability to form a complex with MHC molecules and, where appropriate, generate an immune response, preferably by stimulating cytotoxic or T helper cells.

[0139] A part or fragment of a tumor-associated antigen or of an amino acid sequence described herein preferably comprises a sequence of at least 6, in particular at least 8, at least 10, at least 12, at least 15, at least 20, at least 30 or at least 50, consecutive amino acids of the tumor-associated antigen or of the amino acid sequence. A part or fragment of a tumor-associated antigen or of an amino acid sequence described herein preferably comprises a sequence of up to 8, in particular up to 10, up to 12, up to 15, up to 20, up to 30 or up to 55, consecutive amino acids of the tumor-associated antigen or of the amino acid sequence. A part or fragment of a tumor-associated antigen or of an amino acid sequence described herein is preferably a part of the tumor-associated antigen or of the amino acid sequence which corresponds to the non-transmembrane portion, in particular the extracellular portion of the antigen or amino acid sequence, or is comprised thereof. A part or fragment of a tumor-associated antigen or of an amino acid sequence described herein is preferably a part of the tumor-associated antigen or of the amino acid sequence which may be presented with MHC molecules and when so presented is capable of stimulating a cellular response.

[0140] A “cellular response” is meant to include a cellular response directed to cells characterized by presentation of a tumor-associated antigen with class I or class II MHC. The cellular response relates to cells called T cells or T lymphocytes which act as either ‘helpers’ or ‘killers’. The helper T cells (also termed CD4+ T cells) play a central role by regulating the immune response and the killer cells (also termed cytotoxic T cells, cytolytic T cells, CD8+ T cells or CTLs) kill tumor cells, preventing the production of more tumor cells. Although both arms of the immune response are thought to be necessary, the CTL response may be more important for controlling cancer.

[0141] By “cell characterized by presentation of a tumor-associated antigen with class I MHC” or “cell presenting a tumor-associated antigen with class I MHC” or similar expressions is meant a cell such as a tumor cell or an antigen presenting cell presenting the tumor-associated antigen it expresses or a fragment derived from said tumor-associated antigen, e.g. by processing of the tumor-associated antigen, in the context of MHC Class I molecules. Similarly, the term “tumor characterized by presentation of a tumor-associated antigen with class I MHC” denotes a tumor comprising cells characterized by presentation of a tumor-associated antigen with class I MHC.

[0142] Preferred parts or fragments of a tumor-associated antigen or of an amino acid sequence described herein are in particular suitable for the stimulation of cytotoxic T-lymphocytes in vivo but also for the production of expanded and stimulated T-lymphocytes for the therapeutic adoptive transfer ex vivo.

[0143] In one aspect, a part or fragment of a tumor-associated antigen or of an amino acid sequence described herein comprises an amino acid sequence derived from the sequence of the tumor-associated antigen or of the amino acid sequence. Preferably, a part or fragment of a tumor-associated antigen or of an amino acid sequence described herein is capable of stimulating a cellular response against cells characterized by presentation of a tumor-associated antigen identified according to the invention with class I MHC and/or of elicting antibodies that specifically bind to a tumor-associated antigen identified according to the invention when used itself or attached to an immunogenic carrier. Preferably, a part or fragment of a tumor-associated antigen or of an amino acid sequence described herein may be presented, directly or following processing, with class I MHC molecules. Preferably, a part or fragment of a tumor-associated antigen or of an amino acid sequence described herein is a MHC class I and/or class II presented peptide or can be processed to produce a MHC class I and/or class II presented peptide. Preferably, a part or fragment of a tumor-associated antigen or of an amino acid sequence described herein comprises an amino acid sequence substantially corresponding to the amino acid sequence of a fragment of a tumor-associated antigen or of an amino acid sequence described herein.

[0144] A part or fragment of a tumor-associated antigen or of an amino acid sequence described herein may be present according to the invention as a peptide or peptide antigen as such or in combination with additional amino acid sequences, i.e. it may be comprised in a peptide or peptide antigen. Such peptides or peptide antigens are useful in the compositions and methods of the present invention and generally are included herein by the term “tumor-associated antigen”. In general, such peptides or peptide antigens relate to oligopeptides or polypeptides comprising an amino acid sequence substantially corresponding to the amino acid sequence of a part or fragment of a tumor-associated antigen or of an amino acid sequence described herein. Preferably, such peptides or peptide antigens are capable of stimulating a cellular response against a tumor characterized by presentation of a tumor-associated antigen identified herein with class I MHC and/or of eliciting antibodies that specifically bind to a tumor-associated antigen identified according to the present invention.

[0145] If a peptide or peptide antigen is to be presented directly, i.e. without processing, in particular without cleavage, it has a length which is suitable for binding to an MHC molecule, in particular a class I MHC molecule, and preferably is 7-20 amino acids in length, more preferably 7-12 amino acids in length, more preferably 8-11 amino acids in length, in particular 9 or 10 amino acids in length. Preferably the sequence of a peptide or peptide antigen which is to be presented directly is derived from the amino acid sequence of a tumor-associated antigen or of an amino acid sequence described herein, i.e. its sequence substantially corresponds and is preferably completely identical to a fragment of a tumor-associated antigen or of an amino acid sequence described herein. If a peptide or peptide antigen is to be presented following processing, in particular following cleavage, the peptide produced by processing has a length which is suitable for binding to an MHC molecule, in particular a class I MHC molecule, and preferably is 7-20 amino acids in length, more preferably 7-12 amino acids in length, more preferably 8-11 amino acids in length, in particular 9 or 10 amino acids in length. Preferably the sequence of the peptide which is to be presented following processing is derived from the amino acid sequence of a tumor-associated antigen or of an amino acid sequence described herein, i.e. its sequence substantially corresponds and is preferably completely identical to a fragment of a tumor-associated antigen or of an amino acid sequence described herein. Thus, a peptide or peptide antigen according to the invention in one embodiment comprises a sequence of 7-20 amino acids in length, more preferably 7-12 amino acids in length, more preferably 8-11 amino acids in length, in particular 9 or 10 amino acids in length which substantially corresponds and is preferably completely identical to a fragment of a tumor-associated antigen or of an amino acid sequence described herein and following processing of the peptide or peptide antigen makes up the presented peptide. However, the peptide or peptide antigen may also comprise a sequence which substantially corresponds and preferably is completely identical to a fragment of a tumor-associated antigen or of an amino acid sequence described herein which is even longer than the above stated sequence. In one embodiment, a peptide or peptide antigen may comprise the entire sequence of a tumor-associated antigen or of an amino acid sequence described herein.

[0146] Peptides having amino acid sequences differing at residues that do not affect TCR recognition but improve the stability of binding to MHC may improve the immunogenicity of the peptide or peptide antigen, and may be referred to herein as “optimized peptides”. Using existing knowledge about which of these residues may be more likely to affect binding either to the MHC or to the TCR, a rational approach to the design of substantially corresponding peptides may be employed. Resulting peptides that are functional are contemplated herein.

[0147] In one embodiment, a part or a fragment of a nucleic acid coding for a tumor-associated antigen relates according to the invention to the part of the nucleic acid, which codes at least for the tumor-associated antigen and/or for a part or a fragment of said tumor-associated antigen, as defined above. A part or fragment of a nucleic acid coding for a tumor-associated antigen is preferably that part of the nucleic acid corresponding to the open reading frame.

[0148] According to the invention, particular embodiments ought to involve providing “dominant negative” proteins or peptides derived from tumor-associated antigens. A dominant negative protein or peptide is an inactive protein or peptide variant which, by way of interacting with the cellular machinery, displaces an active protein or peptide from its interaction with the cellular machinery or which competes with the active protein or peptide, thereby reducing the effect of said active protein.

[0149] Antisera which contain specific antibodies specifically binding to the target protein can be prepared by various standard processes; see, for example, “Monoclonal Antibodies: A Practical Approach” by Philip Shepherd, Christopher Dean ISBN 0-19-963722-9; “Antibodies: A Laboratory Manual” by Ed Harlow, David Lane, ISBN: 0879693142 and “Using Antibodies: A Laboratory Manual: Portable Protocol NO” by Edward Harlow, David Lane, Ed Harlow ISBN 0879695447. Thereby it is also possible to generate affine and specific antibodies which recognize complex membrane proteins in their native form (Azorsa et al., J. Immunol. Methods 229: 35-48, 1999; Anderson et al., J. Immunol. 143: 1899-1904, 1989; Gardsvoll, J. Immunol. Methods 234: 107-116, 2000). This is in particular relevant for the preparation of antibodies which are to be used therapeutically, but also for many diagnostic applications. In this respect, it is possible to immunize with the whole protein, with extracellular partial sequences as well as with cells which express the target molecule in physiologically folded form.

[0150] Monoclonal antibodies are traditionally prepared using the hybridoma technology. (for technical details see: “Monoclonal Antibodies: A Practical Approach” by Philip Shepherd, Christopher Dean ISBN 0-19-963722-9; “Antibodies: A Laboratory Manual” by Ed Harlow, David Lane ISBN: 0879693142; “Using Antibodies: A Laboratory Manual: Portable Protocol NO” by Edward Harlow, David Lane, Ed Harlow ISBN: 0879695447).

[0151] It is known that only a small part of an antibody molecule, the paratope, is involved in binding of the antibody to its epitope (cf. Clark, W. R. (1986), The Experimental Foundations of Modern Immunology, Wiley & Sons, Inc., New York; Roitt, I. (1991), Essential Immunology, 7th Edition, Blackwell Scientific Publications, Oxford). The pFc′ and Fc regions are, for example, effectors of the complement cascade but are not involved in antigen binding. An antibody from which the pFc′ region has been enzymatically removed or which has been produced without the pFc′ region, referred to as F(ab′)₂ fragment, carries both antigen binding sites of a complete antibody. Similarly, an antibody from which the Fc region has been enzymatically removed or which has been produced without said Fc region, referred to as Fab fragment, carries one antigen binding site of an intact antibody molecule. Furthermore, Fab fragments consist of a covalently bound light chain of an antibody and part of the heavy chain of said antibody, referred to as Fd. The Fd fragments are the main determinants of antibody specificity (a single Fd fragment can be associated with up to ten different light chains, without altering the specificity of the antibody) and Fd fragments, when isolated, retain the ability to bind to an epitope.

[0152] Located within the antigen-binding part of an antibody are complementary-determining regions (CDRs) which interact directly with the antigen epitope and framework regions (FRs) which maintain the tertiary structure of the paratope. Both the Fd fragment of the heavy chain and the light chain of IgG immunoglobulins contain four framework regions (FR1 to FR4) which are separated in each case by three complementary-determining regions (CDR1 to CDR3). The CDRs and, in particular, the CDR3 regions and, still more particularly, the CDR3 region of the heavy chain are responsible to a large extent for antibody specificity.

[0153] Non-CDR regions of a mammalian antibody are known to be able to be replaced by similar regions of antibodies with the same or a different specificity, with the specificity for the epitope of the original antibody being retained. This made possible the development of “humanized” antibodies in which nonhuman CDRs are covalently linked to human FR and/or Fc/pFc′ regions to produce a functional antibody.

[0154] As another example, WO 92/04381 describes the production and use of humanized murine RSV antibodies in which at least part of the murine FR regions have been replaced with FR regions of a human origin. Antibodies of this kind, including fragments of intact antibodies with antigen-binding capability, are often referred to as “chimeric” antibodies.

[0155] According to the invention, the term “antibody” also includes F(ab′)₂, Fab, Fv, and Fd fragments of antibodies, chimeric antibodies, in which the Fc and/or FR and/or CDR1 and/or CDR2 and/or light chain-CDR3 regions have been replaced with homologous human or nonhuman sequences, chimeric F(ab′)₂-fragment antibodies in which the FR and/or CDR1 and/or CDR2 and/or light chain-CDR3 regions have been replaced with homologous human or nonhuman sequences, chimeric Fab-fragment antibodies in which the FR and/or CDR1 and/or CDR2 and/or light chain-CDR3 regions have been replaced with homologous human or nonhuman sequences, and chimeric Fd-fragment antibodies in which the FR and/or CDR1 and/or CDR2 regions have been replaced with homologous human or nonhuman sequences. The term “antibody” also comprises “single-chain” antibodies.

[0156] The invention also comprises proteins and peptides which bind specifically to tumor-associated antigens. Binding substances of this kind may be provided, for example, by degenerate peptide libraries which may be prepared simply in solution in an immobilized form or as phage-display libraries. It is likewise possible to prepare combinatorial libraries of peptides with one or more amino acids. Libraries of peptoids and nonpeptidic synthetic residues may also be prepared.

[0157] Antibodies may also be coupled to specific diagnostic substances for displaying cells and tissues expressing tumor-associated antigens. They may also be coupled to therapeutically useful substances.

[0158] Diagnostic substances or agents include any label that functions to: (i) provide a detectable signal; (ii) interact with a second label to modify the detectable signal provided by the first or second label, e.g. FRET (Fluorescence Resonance Energy Transfer); (iii) affect mobility, e.g. electrophoretic mobility, by charge, hydrophobicity, shape, or other physical parameters, or (iv) provide a capture moiety, e.g., affinity, antibody/antigen, or ionic complexation. Suitable as label are structures, such as fluorescent labels, luminescent labels, chromophore labels, radioisotopic labels, isotopic labels, preferably stable isotopic labels, isobaric labels, enzyme labels, particle labels, in particular metal particle labels, magnetic particle labels, polymer particle labels, small organic molecules such as biotin, ligands of receptors or binding molecules such as cell adhesion proteins or lectins, label-sequences comprising nucleic acids and/or amino acid residues which can be detected by use of binding agents, etc. Diagnostic substances comprise, in a nonlimiting manner, barium sulfate, iocetamic acid, iopanoic acid, calcium ipodate, sodium diatrizoate, meglumine diatrizoate, metrizamide, sodium tyropanoate and radio diagnostic, including positron emitters such as fluorine-18 and carbon-11, gamma emitters such as iodine-123, technetium-99m, iodine-131 and indium-111, nuclides for nuclear magnetic resonance, such as fluorine and gadolinium.

[0159] According to the invention, the terms “therapeutically useful substance”, “therapeutic substance” or “therapeutic agent” means any molecule which may exert a therapeutic effect. According to the invention, a therapeutically useful substance is preferably selectively guided to a cell which expresses one or more tumor-associated antigens and includes anticancer agents, radioactive compounds such as radioactive iodine-labeled compounds, toxins, cytostatic or cytolytic drugs, etc. Anticancer agents comprise, for example, aminoglutethimide, azathioprine, bleomycin sulfate, busulfan, carmustine, chlorambucil, cisplatin, cyclophosphamide, cyclosporine, cytarabidine, dacarbazine, dactinomycin, daunorubin, doxorubicin, taxol, etoposide, fluorouracil, interferon-α, lomustine, mercaptopurine, methotrexate, mitotane, procarbazine HCl, thioguanine, vinblastine sulfate and vincristine sulfate. Other anticancer agents are described, for example, in Goodman and Gilman, “The Pharmacological Basis of Therapeutics”, 8th Edition, 1990, McGraw-Hill, Inc., in particular Chapter 52 (Antineoplastic Agents (Paul Calabresi and Bruce A. Chabner). Toxins may be proteins such as pokeweed antiviral protein, cholera toxin, pertussis toxin, ricin, gelonin, abrin, diphtheria exotoxin or Pseudomonas exotoxin. Toxin residues may also be high energy-emitting radionuclides such as cobalt-60.

[0160] The term “major histocompatibility complex” or “MHC” relates to a complex of genes present in all vertebrates. MHC proteins or molecules are involved in signaling between lymphocytes and antigen presenting cells in normal immune reactions by binding peptides and presenting them for recognition by T cell receptors (TCR). MHC molecules bind peptides within an intracellular processing compartment and present these peptides on the surface of antigen presenting cells for recognition by T cells. The human MHC region also termed HLA is located on chromosome 6 and includes the class I and class II region. In one preferred embodiment of all aspects of the invention an MHC molecule is an HLA molecule.

[0161] “Reduce” or “inhibit” as used herein means the ability to cause an overall decrease, preferably of 20% or greater, more preferably of 50% or greater, and most preferably of 75% or greater, in the level, e.g. in the level of protein or mRNA as compared to a reference sample (e.g., a sample not treated with siRNA). This reduction or inhibition of RNA or protein expression can occur through targeted mRNA cleavage or degradation. Assays for protein expression or nucleic acid expression are known in the art and include, for example, ELISA, western blot analysis for protein expression, and northern blotting or RNase protection assays for RNA.

[0162] The term “patient” means according to the invention a human being, a nonhuman primate or another animal, in particular a mammal such as a cow, horse, pig, sheep, goat, dog, cat or a rodent such as a mouse and rat. In a particularly preferred embodiment, the patient is a human being.

[0163] According to the invention the term “increased” or “increased amount” preferably refers to an increase by at least 10%, in particular at least 20%, at least 50% or at least 100%. The amount of a substance is also increased in a test sample such as a biological sample compared to a reference sample if it is detectable in the test sample but absent or not detectable in the reference sample.

[0164] According to the invention, the term “disease” refers to any pathological state in which tumor-associated nucleic acids and/or tumor-associated antigens are expressed or abnormally expressed. According to the invention, the term “tumor” or “tumor disease” refers to a swelling or lesion formed by an abnormal growth of cells (called neoplastic cells or tumor cells). By “tumor cell” is meant an abnormal cell that grows by a rapid, uncontrolled cellular proliferation and continues to grow after the stimuli that initiated the new growth cease. Tumors show partial or complete lack of structural organization and functional coordination with the normal tissue, and usually form a distinct mass of tissue, which may be either benign, pre-malignant or malignant. Preferably, a tumor disease according to the invention is a cancer disease, i.e. a malignant disease and a tumor cell is a cancer cell. Preferably, a tumor disease is characterized by cells in which a tumor-associated nucleic acid and/or tumor-associated antigen identified according to the invention is expressed or abnormally expressed and a tumor cell or a circulating or metastatic tumor cell is characterized by expression or abnormal expression of a tumor-associated nucleic acid and/or tumor-associated antigen identified according to the invention. Preferably, a tumor disease, a tumor cell or a circulating or metastatic tumor cell is characterized by presentation of a tumor-associated antigen identified according to the invention with class I MHC.

[0165] “Abnormal expression” means according to the invention that expression is altered, preferably increased, compared to the state in a healthy individual. An increase in expression refers to an increase by at least 10%, in particular at least 20%, at least 50% or at least 100%. In one embodiment, expression is only found in a diseased tissue, while expression in a healthy tissue is repressed or essentially repressed. One example of such a disease is cancer, wherein the term “cancer” according to the invention comprises leukemias, seminomas, melanomas, teratomas, lymphomas, neuroblastomas, gliomas, rectal cancer, endometrial cancer, kidney cancer, adrenal cancer, thyroid cancer, blood cancer, skin cancer, cancer of the brain, cervical cancer, intestinal cancer, liver cancer, colon cancer, stomach cancer, intestine cancer, head and neck cancer, gastrointestinal cancer, lymph node cancer, esophagus cancer, colorectal cancer, pancreas cancer, ear, nose and throat (ENT) cancer, breast cancer, prostate cancer, cancer of the uterus, ovarian cancer and lung cancer and the matastases thereof. Examples thereof are lung carcinomas, mamma carcinomas, prostate carcinomas, colon carcinomas, renal cell carcinomas, cervical carcinomas, or metastases of the cancer types or tumors described above. The term cancer according to the invention also comprises cancer metastases.

[0166] By “metastasis” is meant the spread of cancer cells from its original site to another part of the body. The formation of metastasis is a very complex process and depends on detachment of malignant cells from the primary tumor, invasion of the extracellular matrix, penetration of the endothelial basement membranes to enter the body cavity and vessels, and then, after being transported by the blood, infiltration of target organs. Finally, the growth of a new tumor at the target site depends on angiogenesis. Tumor metastasis often occurs even after the removal of the primary tumor because tumor cells or components may remain and develop metastatic potential. In one embodiment, the term “metastasis” according to the invention relates to “distant metastasis” which relates to a metastasis which is remote from the primary tumor and the regional lymph node system.

[0167] According to the invention, a biological sample may be a tissue sample, including bodily fluids, and/or a cellular sample and may be obtained in the conventional manner such as by tissue biopsy, including punch biopsy, and by taking blood, bronchial aspirate, sputum, urine, feces or other body fluids. In one embodiment, a biological sample is obtained from a tissue for which a connection between expression of the target nucleic acids or target antigens identified herein and a cancer disease is demonstrated herein. In one embodiment, a biological sample is obtained from a tissue for which overexpression of the target nucleic acids or target antigens identified herein in a cancer tissue compared to normal tissues is demonstrated herein. In this embodiment, the diagnostic methods disclosed herein aim at diagnosing cancer of said tissue. For example, in the case of lung cancer, the sample may be a sample comprising lung tissue. According to the invention, the term “biological sample” also includes processed biological samples such as fractions or isolates of biological samples, e.g. nucleic acid and peptide/protein isolates. Preferably, the term “biological sample” according to the invention does not include samples derived from placental tissue or samples derived from tissues which demonstrate expression of the target nucleic acids or target antigens identified herein even if not affected by cancer.

[0168] Some aspects of the present invention envision the immunotherapy of tumor diseases, in particular cancer diseases, utilizing the tumor-associated nucleic acids and tumor-associated antigens identified according to the invention by means of active or passive immunotherapeutioc approaches which can be summarized as follows:

### Immunotherapy

[0169] I. Active immunotherapy (“Cancer vaccines”)

[0170] Immunisation with:

i) antigen or peptide (native or modified)
ii) nucleic acid encoding the antigen or peptide
iii) recombinant cells encoding the antigen or peptide
iv) recombinant viruses encoding the antigen or peptide
v) antigen presenting cells pulsed with antigen or peptide (native or modified) or transfected with nucleic acids encoding the antigen or peptide
II. Passive immunotherapy (“Adoptive immunotherapy”)
vi) Transfer of antibodies or T cell receptors that recognise antigen
vii) Transfer of cells sensitized in vitro to antigen (bulk or cloned populations)
viii) Transfer of effector cells (or stem cells) transduced with nucleic acids encoding T cell receptors that recognise antigen and preferably are responsive to tumor-specific class I MHC presented peptides

[0171] Antigen presenting cells (APC) such as dendritic cells (DCs) can be loaded with either MHC class I-presented peptide antigens or tumor lysate, or transduced with nucleic acid such as by transduction using adenovirus encoding a tumor-associated antigen, in particular a peptide antigen.

[0172] In a preferred embodiment, an anti-tumor vaccine of the invention comprises an APC loaded with peptide antigen. In this respect, protocols may rely on in vitro culture/differentiation of DCs manipulated in such a way that they artificially present peptide antigen. Production of genetically engineered DCs may involve introduction of nucleic acids encoding tumor-associated antigens or peptide antigens into DCs. Transfection of DCs with mRNA is a promising antigen-loading technique of stimulating strong antitumor immunity.

[0173] If used for passive anti-tumor immunotherapy, antibodies may or may not be attached to therapeutic effector moieties, e.g., radiolabels, cytotoxins, therapeutic enzymes, agents that induce apoptosis, and the like in order to provide for targeted cytotoxicity, i.e., killing of tumor cells. In one embodiment of the present invention, such antibodies or fragments are administered in labeled or unlabeled form, alone or in conjunction with other therapeutics, e.g., chemotherapeutics such as cisplatin, methotrexate, adriamycin, and the like suitable for cancer therapy.

[0174] Preferably the antibodies described herein mediate killing of cells by inducing complement dependent cytotoxicity (CDC) mediated lysis, antibody dependent cellular cytotoxicity (ADCC) mediated lysis, apoptosis, homotypic adhesion, and/or phagocytosis, preferably by inducing CDC mediated lysis and/or ADCC mediated lysis. The antibodies described herein preferably interact with components of the immune system, preferably through ADCC or CDC. However, antibodies of the invention may also exert an effect simply by binding to tumor-associated antigens on the cell surface, thus, e.g. blocking proliferation of the cells.

[0175] ADCC describes the cell-killing ability of effector cells as described herein, in particular lymphocytes, which preferably requires the target cell being marked by an antibody.

[0176] ADCC preferably occurs when antibodies bind to antigens on tumor cells and the antibody Fc domains engage Fc receptors (FcR) on the surface of immune effector cells. Several families of Fc receptors have been identified, and specific cell populations characteristically express defined Fc receptors. ADCC can be viewed as a mechanism to directly induce a variable degree of immediate tumor destruction that also leads to antigen presentation and the induction of tumor-directed T-cell responses. Preferably, in vivo induction of ADCC will lead to tumor-directed T-cell responses and host-derived antibody responses.

[0177] CDC is another cell-killing method that can be directed by antibodies. IgM is the most effective isotype for complement activation. IgG1 and IgG3 are also both very effective at directing CDC via the classical complement-activation pathway. Preferably, in this cascade, the formation of antigen-antibody complexes results in the uncloaking of multiple C1q binding sites in close proximity on the C_{H}2 domains of participating antibody molecules such as IgG molecules (C1q is one of three subcomponents of complement C1). Preferably these uncloaked C1q binding sites convert the previously low-affinity C1q-IgG interaction to one of high avidity, which triggers a cascade of events involving a series of other complement proteins and leads to the proteolytic release of the effector-cell chemotactic/activating agents C3a and C5a. Preferably, the complement cascade ends in the formation of a membrane attack complex, which creates pores in the cell membrane that facilitate free passage of water and solutes into and out of the cell and may lead to apoptosis.

[0178] Passive immunotherapy with immune cells (optionally genetically modified) capable of recognizing tumor-associated antigens is effective in mediating the regression of cancer in selected patients. These techniques may be based on ex-vivo reactivation and expansion of cloned or polyclonal cultures of tumor reactive T cells. After culture, T cells may be reinfused into the patient along with IL-2. In vitro techniques have been developed in which human lymphocytes are sensitized in vitro to tumor peptide antigens presented on antigen presenting cells. By repetitive in vitro stimulation cells can be derived with a great capacity to recognize human tumor-associated antigens. The adoptive transfer of these cells may be more effective in mediating tumor regression in vivo than are conventionally grown cells.

[0179] According to the invention, the term “immunoreactive cell” means a cell which can mature into an immune cell (such as B cell, T helper cell, or cytolytic T cell) with suitable stimulation. Immunoreactive cells comprise CD34⁺ hematopoietic stem cells, immature and mature T cells and immature and mature B cells. If production of cytolytic or T helper cells recognizing a tumor-associated antigen is desired, the immunoreactive cell is contacted with a cell expressing a tumor-associated antigen under conditions which favor production, differentiation and/or selection of cytolytic T cells and of T helper cells. The differentiation of T cell precursors into a cytolytic T cell, when exposed to an antigen, is similar to clonal selection of the immune system.

[0180] The terms “T cell” and “T lymphocyte” are used interchangeably herein and include T helper cells and cytotoxic T cells which comprise cytolytic T cells.

[0181] Some therapeutic methods are based on a reaction of the immune system of a patient, which results in a lysis of antigen-presenting cells such as cancer cells which present one or more tumor-associated antigens. In this connection, for example autologous cytotoxic T lymphocytes specific for a complex of a tumor-associated antigen and an MHC molecule are administered to a patient having a cellular abnormality. The production of such cytotoxic T lymphocytes in vitro is known. An example of a method of differentiating T cells can be found in WO-A-9633265. Generally, a sample containing cells such as blood cells is taken from the patient and the cells are contacted with a cell which presents the complex and which can cause propagation of cytotoxic T lymphocytes (e.g. dendritic cells). The target cell may be a transfected cell such as a COS cell. These transfected cells present the desired complex on their surface and, when contacted with cytotoxic T lymphocytes, stimulate propagation of the latter. The clonally expanded autologous cytotoxic T lymphocytes are then administered to the patient.

[0182] In another method of selecting antigen-specific cytotoxic T lymphocytes, fluorogenic tetramers of MHC class I molecule/peptide complexes are used for obtaining specific clones of cytotoxic T lymphocytes (Altman et al., Science 274:94-96, 1996; Dunbar et al., Curr. Biol. 8:413-416, 1998).

[0183] The present invention also includes therapeutic methods referred to as adoptive transfer (Greenberg, J. Immunol. 136(5):1917, 1986; Riddel et al., Science 257:238, 1992; Lynch et al., Eur. J. Immunol. 21:1403-1410, 1991; Kast et al., Cell 59:603-614, 1989), wherein cells presenting the desired complex (e.g. dendritic cells) are combined with cytotoxic T lymphocytes of the patient to be treated, resulting in a propagation of specific cytotoxic T lymphocytes. The propagated cytotoxic T lymphocytes are then administered to a patient having a cellular anomaly characterized by particular abnormal cells presenting the specific complex. The cytotoxic T lymphocytes then lyse the abnormal cells, thereby achieving a desired therapeutic effect.

[0184] Furthermore, cells presenting the desired complex (e.g. dendritic cells) may be combined with cytotoxic T lymphocytes of healthy individuals or another species (e.g. mouse) which may result in propagation of specific cytotoxic T lymphocytes with high affinity. The high affinity T cell receptor of these propagated specific T lymphocytes may be cloned and optionally humanized to a different extent, and the T cell receptors thus obtained then transduced via gene transfer, for example using retroviral vectors, into T cells of patients. Adoptive transfer may then be carried out using these genetically altered T lymphocytes (Stanislawski et al., Nat. Immunol. 2:962-70, 2001; Kessels et al., Nat. Immunol. 2:957-61, 2001).

[0185] Adoptive transfer is not the only form of therapy which can be applied according to the invention. Cytotoxic T lymphocytes may also be generated in vivo in a manner known per se. One method uses nonproliferative cells expressing the complex. The cells used here will be those which usually express the complex, such as irradiated tumor cells or cells transfected with one or both genes necessary for presentation of the complex (i.e. the antigenic peptide and the presenting MHC molecule). Another preferred form is the introduction of the tumor-associated antigen in the form of recombinant RNA which may be introduced into cells by liposomal transfer or by electroporation, for example. The resulting cells present the complex of interest and are recognized by autologous cytotoxic T lymphocytes which then propagate.

[0186] A similar effect can be achieved by combining the tumor-associated antigen or a fragment thereof with an adjuvant in order to make incorporation into antigen-presenting cells in vivo possible. The tumor-associated antigen or a fragment thereof may be represented as protein, as DNA (e.g. within a vector) or as RNA. The tumor-associated antigen is processed to produce a peptide partner for the MHC molecule, while a fragment thereof may be presented without the need for further processing. The latter is the case in particular, if these can bind to MI-IC molecules. Preference is given to administration forms in which the complete antigen is processed in vivo by a dendritic cell, since this may also produce T helper cell responses which are needed for an effective immune response (Ossendorp et al., Immunol Lett. 74:75-9, 2000; Ossendorp et al., J. Exp. Med. 187:693-702, 1998). In general, it is possible to administer an effective amount of the tumor-associated antigen to a patient by intradermal injection, for example. However, injection may also be carried out intranodally into a lymph node (Maloy et al., Proc Natl Acad Sci USA 98:3299-303, 2001).

[0187] The pharmaceutical compositions and methods of treatment described according to the invention may also be used for immunization or vaccination to therapeutically treat or prevent a disease described herein. According to the invention, the terms “immunization” or “vaccination” preferably relate to an increase in or activation of an immune response to an antigen. It is possible to use animal models for testing an immunizing effect on cancer by using a tumor-associated antigen or a nucleic acid coding therefor. For example, human cancer cells may be introduced into a mouse to generate a tumor, and one or more nucleic acids coding for tumor-associated antigens may be administered. The effect on the cancer cells (for example reduction in tumor size) may be measured as a measure for the effectiveness of an immunization by the nucleic acid.

[0188] As part of the composition for an immunization or a vaccination, preferably one or more tumor-associated antigens or stimulating fragments thereof are administered together with one or more adjuvants for inducing an immune response or for increasing an immune response. An adjuvant is a substance which is incorporated into the antigen or administered together with the latter and which enhances the immune response. Adjuvants may enhance the immune response by providing an antigen reservoir (extracellularly or in macrophages), activating macrophages and/or stimulating particular lymphocytes. Adjuvants are known and comprise in a nonlimiting way monophosphoryl lipid A (MPL, SmithKline Beecham), saponins such as QS21 (SmithKline Beecham), DQS21 (SmithKline Beecham; WO 96/33739), QS7, QS17, QS18 and QS-L1 (So et al., Mol. Cells 7:178-186, 1997), incomplete Freund's adjuvant, complete Freund's adjuvant, vitamin E, montanide, alum, CpG oligonucleotides (cf. Kreig et al., Nature 374:546-9, 1995) and various water-in-oil emulsions prepared from biologically degradable oils such as squalene and/or tocopherol. Preferably, the peptides are administered in a mixture with DQS21/MPL. The ratio of DQS21 to MPL is typically about 1:10 to 10:1, preferably about 1:5 to 5:1 and in particular about 1:1. For administration to humans, a vaccine formulation typically contains DQS21 and MPL in a range from about 1 μg to about 100 μg.

[0189] Other substances which stimulate an immune response of the patient may also be administered. It is possible, for example, to use cytokines in a vaccination, owing to their regulatory properties on lymphocytes. Such cytokines comprise, for example, interleukin-12 (IL-12) which was shown to increase the protective actions of vaccines (cf. Science 268:1432-1434, 1995), GM-CSF and IL-18.

[0190] There are a number of compounds which enhance an immune response and which therefore may be used in a vaccination. Said compounds comprise costimulating molecules provided in the form of proteins or nucleic acids such as B7-1 and B7-2 (CD80 and CD86, respectively).

[0191] The invention also provides for administration of nucleic acids, proteins or peptides. Proteins and peptides may be administered in a manner known per se. In one embodiment, nucleic acids are administered by ex vivo methods, i.e. by removing cells from a patient, genetic modification of said cells in order to incorporate a tumor-associated antigen and reintroduction of the altered cells into the patient. This generally comprises introducing a functional copy of a gene into the cells of a patient in vitro and reintroducing the genetically altered cells into the patient. The functional copy of the gene is under the functional control of regulatory elements which allow the gene to be expressed in the genetically altered cells. Transfection and transduction methods are known to the skilled worker. The invention also provides for administering nucleic acids in vivo by using vectors such as viruses and target-controlled liposomes. If according to the invention reference is made to the administration or incorporation into pharmaceutical compositions of nucleic acids this includes embodiments wherein the nucleic acid is present in such vectors.

[0192] In a preferred embodiment, a virus or viral vector for administering a nucleic acid coding for a tumor-associated antigen is selected from the group consisting of adenoviruses, adeno-associated viruses, pox viruses, including vaccinia virus and attenuated pox viruses, Semliki Forest virus, retroviruses, Sindbis virus and Ty virus-like particles. Particular preference is given to adenoviruses and retroviruses. The retroviruses are typically replication-deficient (i.e. they are incapable of generating infectious particles).

[0193] Methods of introducing nucleic acids into cells in vitro or in vivo comprise transfection of nucleic acid calcium phosphate precipitates, transfection of nucleic acids associated with DEAE, transfection or infection with the above viruses carrying the nucleic acids of interest, liposome-mediated transfection, and the like. In particular embodiments, preference is given to directing the nucleic acid to particular cells. In such embodiments, a carrier used for administering a nucleic acid to a cell (e.g. a retrovirus or a liposome) may have a bound target control molecule. For example, a molecule such as an antibody specific for a surface membrane protein on the target cell or a ligand for a receptor on the target cell may be incorporated into or attached to the nucleic acid carrier. Preferred antibodies comprise antibodies which bind selectively a tumor-associated antigen. If administration of a nucleic acid via liposomes is desired, proteins binding to a surface membrane protein associated with endocytosis may be incorporated into the liposome formulation in order to make target control and/or uptake possible. Such proteins comprise capsid proteins or fragments thereof which are specific for a particular cell type, antibodies to proteins which are internalized, proteins addressing an intracellular site, and the like.

[0194] The therapeutic compositions of the invention may be administered in pharmaceutically compatible preparations. Such preparations may usually contain pharmaceutically compatible concentrations of salts, buffer substances, preservatives, carriers, supplementing immunity-enhancing substances such as adjuvants, e.g. CpG oligonucleotides, cytokines, chemokines, saponin, GM-CSF and/or RNA and, where appropriate, other therapeutically active compounds.

[0195] The therapeutically active compounds of the invention may be administered via any conventional route, including by injection or infusion. The administration may be carried out, for example, orally, intravenously, intraperitonealy, intramuscularly, subcutaneously or transdermally. Preferably, antibodies are therapeutically administered by way of a lung aerosol. Antisense nucleic acids are preferably administered by slow intravenous administration.

[0196] The compositions of the invention are administered in effective amounts. An “effective amount” refers to the amount which achieves a desired reaction or a desired effect alone or together with further doses. In the case of treatment of a particular disease or of a particular condition characterized by expression of one or more tumor-associated antigens, the desired reaction preferably relates to inhibition of the course of the disease. This comprises slowing down the progress of the disease and, in particular, interrupting or reversing the progress of the disease. The desired reaction in a treatment of a disease or of a condition may also be delay of the onset or a prevention of the onset of said disease or said condition. According to the invention, a diagnosis or treatment of cancer may also include the diagnosis or treatment of cancer metastases which have already formed or will form. According to the invention, the term “treatment” comprises therapeutic and prophylactic treatment, i.e. prevention.

[0197] An effective amount of a composition of the invention will depend on the condition to be treated, the severeness of the disease, the individual parameters of the patient, including age, physiological condition, size and weight, the duration of treatment, the type of an accompanying therapy (if present), the specific route of administration and similar factors.

[0198] The pharmaceutical compositions of the invention are preferably sterile and contain an effective amount of the therapeutically active substance to generate the desired reaction or the desired effect.

[0199] The doses administered of the compositions of the invention may depend on various parameters such as the type of administration, the condition of the patient, the desired period of administration, etc. In the case that a reaction in a patient is insufficient with an initial dose, higher doses (or effectively higher doses achieved by a different, more localized route of administration) may be used.

[0200] Generally, doses of the tumor-associated antigen of from 1 ng to 1 mg, preferably from 10 ng to 100 μg, are formulated and administered for a treatment or for generating or increasing an immune response. If the administration of nucleic acids (DNA and RNA) coding for tumor-associated antigens is desired, doses of from 1 ng to 0.1 mg are formulated and administered.

[0201] The pharmaceutical compositions of the invention are generally administered in pharmaceutically compatible amounts and in pharmaceutically compatible compositions. The term “pharmaceutically compatible” refers to a nontoxic material which does not interact with the action of the active component of the pharmaceutical composition. Preparations of this kind may usually contain salts, buffer substances, preservatives, carriers and, where appropriate, other therapeutically active compounds. When used in medicine, the salts should be pharmaceutically compatible. However, salts which are not pharmaceutically compatible may used for preparing pharmaceutically compatible salts and are included in the invention. Pharmacologically and pharmaceutically compatible salts of this kind comprise in a nonlimiting way those prepared from the following acids: hydrochloric, hydrobromic, sulfuric, nitric, phosphoric, maleic, acetic, salicylic, citric, formic, malonic, succinic acids, and the like. Pharmaceutically compatible salts may also be prepared as alkali metal salts or alkaline earth metal salts, such as sodium salts, potassium salts or calcium salts.

[0202] A pharmaceutical composition of the invention may comprise a pharmaceutically compatible carrier. According to the invention, the term “pharmaceutically compatible carrier” refers to one or more compatible solid or liquid fillers, diluents or encapsulating substances, which are suitable for administration to humans. The term “carrier” refers to an organic or inorganic component, of a natural or synthetic nature, in which the active component is combined in order to facilitate application. The components of the pharmaceutical composition of the invention are usually such that no interaction occurs which substantially impairs the desired pharmaceutical efficacy.

[0203] The pharmaceutical compositions of the invention may contain suitable buffer substances such as acetic acid in a salt, citric acid in a salt, boric acid in a salt and phosphoric acid in a salt.

[0204] The pharmaceutical compositions may, where appropriate, also contain suitable preservatives such as benzalkonium chloride, chlorobutanol, paraben and thimerosal.

[0205] The pharmaceutical compositions are usually provided in a uniform dosage form and may be prepared in a manner known per se. Pharmaceutical compositions of the invention may be in the form of capsules, tablets, lozenges, solutions, suspensions, syrups, elixirs or in the form of an emulsion, for example.

[0206] Compositions suitable for parenteral administration usually comprise a sterile aqueous or nonaqueous preparation of the active compound, which is preferably isotonic to the blood of the recipient. Examples of compatible carriers and solvents are Ringer solution and isotonic sodium chloride solution. In addition, usually sterile, fixed oils are used as solution or suspension medium.

[0207] The present invention is described in detail by the figures and examples below, which are used only for illustration purposes and are not meant to be limiting. Owing to the description and the examples, further embodiments which are likewise included in the invention are accessible to the skilled worker.

### FIGURES

[0208] FIG. 1. Expression of a tumor-associated nucleic acid identified according to the present invention in normal tissues and cancer tissue Significant expression of the nucleic acid sequence according to SEQ ID NO:540 was found only in placenta tissue and mamma carcinomas.

[0209] FIG. 2. Quantitative expression of a tumor-associated nucleic acid identified according to the present invention in normal tissues and cancer tissue Quantitative RT-PCR showed selective expression of the nucleic acid sequence according to SEQ ID NO:540 in placenta tissue and mamma carcinomas.

[0210] FIG. 3. Quantitative expression of SEQ ID NO:540 mRNA in MCF-7 breast cancer cells Real-time RT-PCR 24 h after transfection with siRNA oligos showed that both SEQ ID NO:540-specific siRNAs (siRNA#1 (SEQ ID NO:630, 631), siRNA#2 (SEQ ID NO:632, 633)) induce robust silencing of SEQ ID NO:540 expression.

[0211] FIG. 4. Silencing of SEQ ID NO:540 expression by transfection with siRNA oligos results in impaired proliferation of MCF-7 breast cancer cells Proliferation was quantified 96 h after transfection with siRNAs by measuring incorporation of BrdU in newly synthesized DNA strands. These results show that SEQ ID NO:540 is a positive factor for the proliferation of breast cancer cells.

[0212] FIG. 5. Quantitative expression of SEQ ID NO:541 in normal tissues and cancer tissue Real-time RT-PCR showed overexpression of the nucleic acid sequence according to SEQ ID NO:541 in lung cancer.

[0213] FIG. 6. Quantitative expression of SEQ ID NO:545 in normal tissues and cancer tissues Real-time RT-PCR showed overexpression of the nucleic acid sequence according to SEQ ID NO:545 in malignant melanomas.

[0214] FIG. 7. Quantitative expression of SEQ ID NO:549 in normal tissues and cancer tissues Real-time RT-PCR showed overexpression of the nucleic acid sequence according to SEQ ID NO:549 in ovarian cancer.

[0215] FIG. 8. Quantitative expression of SEQ ID NO:553 in normal tissues and cancer tissues Real-time RT-PCR showed overexpression of the nucleic acid sequence according to SEQ ID NO:553 in colon cancer and ovarian cancer.

[0216] FIG. 9. Quantitative expression of SEQ ID NO:557 in normal tissues and cancer tissues Real-time RT-PCR showed overexpression of the nucleic acid sequence according to SEQ ID NO:557 in breast cancer.

[0217] FIG. 10. Quantitative expression of SEQ ID NO:560 in normal tissues and cancer tissues Real-time RT-PCR showed overexpression of the nucleic acid sequence according to SEQ ID NO:560 in colon cancer and ovarian cancer.

[0218] FIG. 11. Quantitative expression of SEQ ID NO:563 in normal tissues and cancer tissues Real-time RT-PCR showed overexpression of the nucleic acid sequence according to SEQ ID NO:563 in breast cancer, colon cancer, ovarian cancer, lung cancer and melanoma.

[0219] FIG. 12. Quantitative expression of SEQ ID NO:566 in normal tissues and cancer tissues Real-time RT-PCR showed overexpression of the nucleic acid sequence according to SEQ ID NO:566 in gastric cancer, breast cancer, colon cancer, ovarian cancer, lung cancer and melanoma.

[0220] FIG. 13. Quantitative expression of SEQ ID NO:570 in normal tissues and cancer tissues Real-time RT-PCR showed overexpression of the nucleic acid sequence according to SEQ ID NO:570 in ovarian cancer, lung cancer and melanoma.

[0221] FIG. 14. Quantitative expression of SEQ ID NO:574 in normal tissues and cancer tissues Real-time RT-PCR showed overexpression of the nucleic acid sequence according to SEQ ID NO:574 in lung cancer and melanoma.

[0222] FIG. 15. Quantitative expression of SEQ ID NO:577 in normal tissues and cancer tissues Real-time RT-PCR showed overexpression of the nucleic acid sequence according to SEQ ID NO:577 in gastric cancer, breast cancer and lung cancer.

[0223] FIG. 16. Quantitative expression of SEQ ID NO:580 in normal tissues and cancer tissues Real-time RT-PCR showed overexpression of the nucleic acid sequence according to SEQ ID NO:580 in ovarian cancer and lung cancer.

[0224] FIG. 17. Quantitative expression of SEQ ID NO:583 in normal tissues and cancer tissues Real-time RT-PCR showed overexpression of the nucleic acid sequence according to SEQ ID NO:583 in colon cancer, ovarian cancer and lung cancer.

[0225] FIG. 18. Quantitative expression of SEQ ID NO:587 in normal tissues and cancer tissues Real-time RT-PCR showed overexpression of the nucleic acid sequence according to SEQ ID NO:587 in lung cancer.

[0226] FIG. 19. Quantitative expression of SEQ ID NO:591 in normal tissues and cancer tissues Real-time RT-PCR showed overexpression of the nucleic acid sequence according to SEQ ID NO:591 in breast cancer, colon cancer, ovarian cancer, lung cancer and melanoma.

[0227] FIG. 20. Quantitative expression of SEQ ID NO:595 in normal tissues and cancer tissues Real-time RT-PCR showed overexpression of the nucleic acid sequence according to SEQ ID NO:595 in gastric cancer, colon cancer, ovarian cancer, lung cancer and melanoma.

[0228] FIG. 21. Quantitative expression of SEQ ID NO:599 in normal tissues and cancer tissues Real-time RT-PCR showed overexpression of the nucleic acid sequence according to SEQ ID NO:599 in gastric cancer, breast cancer, lung cancer and melanoma.

[0229] FIG. 22. Quantitative expression of SEQ ID NO:602 in normal tissues and cancer tissues Real-time RT-PCR showed overexpression of the nucleic acid sequence according to SEQ ID NO:602 in ovarian cancer and lung cancer.

[0230] FIG. 23. Quantitative expression of SEQ ID NO:606 in normal tissues and cancer tissues Real-time RT-PCR showed overexpression of the nucleic acid sequence according to SEQ ID NO:606 in gastric cancer, colon cancer and lung cancer.

[0231] FIG. 24. Quantitative expression of SEQ ID NO:610 in normal tissues and cancer tissues Real-time RT-PCR showed overexpression of the nucleic acid sequence according to SEQ ID NO:610 in gastric cancer, breast cancer and lung cancer.

[0232] FIG. 25. Quantitative expression of SEQ ID NO:613 in normal tissues and cancer tissues Real-time RT-PCR showed overexpression of the nucleic acid sequence according to SEQ ID NO:613 in breast cancer, lung cancer and melanoma.

[0233] FIG. 26. Quantitative expression of SEQ ID NO:617 in normal tissues and cancer tissues Real-time RT-PCR showed overexpression of the nucleic acid sequence according to SEQ ID NO:617 in lung cancer and melanoma.

[0234] FIG. 27. Quantitative expression of SEQ ID NO:620 in normal tissues and cancer tissues Real-time RT-PCR showed overexpression of the nucleic acid sequence according to SEQ ID NO:620 in ovarian cancer and melanoma.

[0235] FIG. 28. Quantitative expression of SEQ ID NO:624 in normal tissues and cancer tissues Real-time RT-PCR showed overexpression of the nucleic acid sequence according to SEQ ID NO:624 in gastric cancer and lung cancer.

[0236] FIG. 29. Quantitative expression of SEQ ID NO:634 in normal tissues and cancer tissues Real-time RT-PCR showed overexpression of the nucleic acid sequence according to SEQ ID NO:634 in ovarian cancer and lung cancer.

[0237] FIG. 30. Quantitative expression of SEQ ID NO:638 in normal tissues and cancer tissues Real-time RT-PCR showed overexpression of the nucleic acid sequence according to SEQ ID NO:638 in colon cancer, ovarian cancer, lung cancer, and malignant melanomas.

[0238] FIG. 31. Quantitative expression of SEQ ID NO:642 in normal tissues and cancer tissues Real-time RT-PCR showed overexpression of the nucleic acid sequence according to SEQ ID NO:642 in breast cancer, ovarian cancer, lung cancer, and malignant melanomas.

[0239] FIG. 32. Quantitative expression of SEQ ID NO:646 in normal tissues and cancer tissues Real-time RT-PCR showed overexpression of the nucleic acid sequence according to SEQ ID NO:646 in gastric cancer, ovarian cancer, and lung cancer.

[0240] FIG. 33. Quantitative expression of SEQ ID NO:649 in normal tissues and cancer tissues Real-time RT-PCR showed overexpression of the nucleic acid sequence according to SEQ ID NO:649 in ovarian cancer, lung cancer, and malignant melanomas.

[0241] FIG. 34. Quantitative expression of SEQ ID NO:653 in normal tissues and cancer tissues Real-time RT-PCR showed overexpression of the nucleic acid sequence according to SEQ ID NO:653 in colon cancer, and lung cancer.

[0242] FIG. 35. Quantitative expression of SEQ ID NO:656 in normal tissues and cancer tissues Real-time RT-PCR showed overexpression of the nucleic acid sequence according to SEQ ID NO:656 in lung cancer, and malignant melanomas.

[0243] FIG. 36. Quantitative expression of SEQ ID NO:660 in normal tissues and cancer tissues Real-time RT-PCR showed overexpression of the nucleic acid sequence according to SEQ ID NO:660 in gastric cancer, ovarian cancer, and malignant melanomas.

[0244] FIG. 37. Quantitative expression of SEQ ID NO:664 in normal tissues and cancer tissues Real-time RT-PCR showed overexpression of the nucleic acid sequence according to SEQ ID NO:664 in gastric cancer, colon cancer, lung cancer, and malignant melanomas.

[0245] FIG. 38. Quantitative expression of SEQ ID NO:668 in normal tissues and cancer tissues Real-time RT-PCR showed overexpression of the nucleic acid sequence according to SEQ ID NO:668 in lung cancer.

[0246] FIG. 39. Quantitative expression of SEQ ID NO:671 in normal tissues and cancer tissues Real-time RT-PCR showed overexpression of the nucleic acid sequence according to SEQ ID NO:671 in lung cancer, and malignant melanomas.

[0247] FIG. 40. Quantitative expression of SEQ ID NO:675 in normal tissues and cancer tissues Real-time RT-PCR showed overexpression of the nucleic acid sequence according to SEQ ID NO:675 in lung cancer, and malignant melanomas.

[0248] FIG. 41. Quantitative expression of SEQ ID NO:679 in normal tissues and cancer tissues Real-time RT-PCR showed overexpression of the nucleic acid sequence according to SEQ ID NO:679 in lung cancer.

[0249] FIG. 42. Quantitative expression of SEQ ID NO:682 in normal tissues and cancer tissues Real-time RT-PCR showed overexpression of the nucleic acid sequence according to SEQ ID NO:682 in gastric cancer, breast cancer, and malignant melanomas.

[0250] FIG. 43. Quantitative expression of SEQ ID NO:686 in normal tissues and cancer tissues Real-time RT-PCR showed overexpression of the nucleic acid sequence according to SEQ ID NO:686 in breast cancer, ovarian cancer, and lung cancer.

### EXAMPLES

[0251] The techniques and methods mentioned herein are carried out in a manner known per se and are described, for example, in Sambrook et al., Molecular Cloning: A Laboratory Manual, 2nd Edition (1989) Cold Spring Harbor Laboratory Press, Cold Spring Harbor, N.Y. All methods including the use of kits and reagents are carried out according to the manufacturers' information unless specifically indicated.

### Example 1

### Screening for Placenta-Specific Genes Aberrantly Activated in Tumors

### Tissues and Cell Lines

[0252] Tissues were obtained as human surplus materials during routine diagnostic or therapeutic procedures and were stored at −80° C. until use. Cell lines were purchased from the American Type Culture Collection (ATCC) and the German Resource Collection of Microorganisms and Cell Culture (DSMZ).

### RNA Isolation and Microarray Hybridization

[0253] Total RNA was isolated using the RNeasy Mini Kit protocol (Qiagen).

[0254] Quantification of isolated RNA was performed using UV-spectroscopy and the quality was determined both by A₂₆₀/A₂₈₀ ratio and Agilent bioanalyzer (Agilent Technologies). Five micrograms total RNA were used for cDNA synthesis with 5 pmol μl⁻¹ T7-oligo(dT)₂₄ primer and was performed at 43° C. for 90 minutes with the “Superscript First-Strand Synthesis-System” for RT-PCR (Invitrogen). Second-strand synthesis was performed with complete cDNA. The cDNA solution was incubated at 16° C. for 2 hours followed by an incubation step for 20 min with 6 U T4-DNA polymerase at 16° C. and the reaction was stopped using 10 μl of 0.5 M EDTA. After purification of the double stranded cDNA using the GeneChip Sample Cleanup Module (Affymetrix) labeled cRNA was generated from the cDNA sample by an in vitro transcription reaction that was supplemented with biotin-11-CTP and biotin-16-UTP (Enzo Diagnostics) according to the manufacturer's instructions. The cRNA was quantified by A₂₆₀, and the quality was determined using the labchip bioanalyzer (Agilent). Only cRNA specimens with a high quality were selected for further analyses. Fragmented cRNA (15 μg) was used to prepare 300 μl hybridization cocktail (100 mM MES, 1 M NaCl, 20 mM EDTA, 0.01% Tween-20) containing 0.1 mg ml⁻¹ of herring sperm DNA, and 0.5 mg ml⁻¹ acetylated bovine serum albumine. Control cRNA was used in order to compare hybridization efficiencies between arrays and to standardize the quantification of measured transcript levels and was included as component of the ‘Eukaryotic Hybridization Control kit’ (Affymetrix, Santa Clara, Calif., USA). The cocktails were heated to 95° C. for 5 minutes, equilibrated at 45° C. for 5 minutes, and clarified by centrifugation. The cocktail was hybridized to HG U133 Plus 2.0 arrays (Affymetrix) at 45° C. for 16 hours. The arrays were washed and stained with a streptavidin-conjugated fluor using the GeneChip fluidics station protocol EukGE-WS2 (Affymetrix) according to the manufacturer's instructions. Arrays were scanned with an argon-ion laser confocal scanner (Hewlett-Packard, Santa Clara, Calif.) with detection at 570 nm. Data were extracted using Microarray Suite version 5.0 (Affymetrix) and linearly scaled to achieve an average intensity of 2,500 per gene. Text files were exported to determine the intensity of each interrogating oligonucleotide perfect match probe cells or mismatch probe cells. In addition, the ratios of 5′- and 3′-ends of mRNA were analyzed of six randomly selected specimens (two of each group) using microarray test-chips (Test3 Array) containing 24 human housekeeping/maintenance genes (Affymetrix) and RNA degradation was not observed.

### Bioinformatic Analysis

[0255] The GeneChip® Operating Software 1.4 (Affymetrix) and ArrayAssist software package 5.2 (Stratagene) were used for statistical analyses.

### Results

[0256] Screening of samples from the 18 normal tissues shown below in table 1 and 30 tumor cell lines of different entities shown below in table 2 resulted in the sequences described herein which are expressed in placenta among the normal tissues investigated and in tumor cell lines.

TABLE 1
Tissues used for microarray expression analysis

| Tissue | Number |
|---|---|
| Placenta | 2 |
| Testis | 2 |
| Mammary gland | 2 |
| Thymus | 2 |
| Skin | 2 |
| Liver | 2 |
| Colon | 2 |
| Esophagus | 2 |
| Stomach | 2 |
| Lung | 2 |
| Kidney | 2 |
| Lymph node | 2 |
| Skeletal muscle | 2 |
| Myocard | 1 |
| Brain | 1 |
| Cerebellum | 1 |
| resting PBMCs | 2 |
| activ. PBMCs | 2 |

TABLE 2
Cell lines used for microarray expression analysis

| Cell line | Tissue |
|---|---|
| BT-549 | Breast cancer |
| MDA-MB-231 metastasizing | Breast cancer |
| MDA-MB-231 non-metastatsizing | Breast cancer |
| MDA-MB-435S | Breast cancer |
| MDA-MB-468 | Breast cancer |
| SK-BR-3 | Breast cancer |
| Caov-3 | Ovarian cancer |
| FU-OV | Ovarian cancer |
| NIH-OVCAR-3 | Ovarian cancer |
| COLO-205 | Colorectal cancer |
| HCT-116 | Colorectal cancer |
| HCT-116 DKO | Colorectal cancer |
| HCT-15 | Colorectal cancer |
| HT-29 | Colorectal cancer |
| LOVO | Colorectal cancer |
| SW-480 | Colorectal cancer |
| CPC-N | Lung cancer |
| LOU-NH-91 | Lung cancer |
| SHP-77 | Lung cancer |
| SK-MES-1 | Lung cancer |
| NCI-H-187 | Lung cancer |
| NCI-H-209 | Lung cancer |
| NCI-H-522 | Lung cancer |
| DU-145 | Prostate cancer |
| LnCaP | Prostate cancer |
| PC-3 | Prostate cancer |
| MEL-JUSO | Melanoma |
| Murowsky | Melanoma |
| SK-MEL-37 | Melanoma |
| HELA | Cervical cancer |

### Example 2

### Validation of the Identified Tumor-Associated Markers

### 1. Examination of RNA Expression

[0257] The identified tumor-associated markers are first validated with the aid of RNA which is obtained from various tissues or from tissue-specific cell lines. Since the differential expression pattern of healthy tissue in comparison with tumor tissue is of decisive importance for the subsequent therapeutic application, the target genes are preferably characterized with the aid of these tissue samples.

[0258] Total RNA is isolated from native tissue samples or from tumor cell lines by standard methods of molecular biology. Said isolation may be carried out, for example, with the aid of the RNeasy Maxi kit (Qiagen, Cat. No. 75162) according to the manufacturer's instructions. This isolation method is based on the use of chaotropic reagent guanidinium isothiocyanate. Alternatively, acidic phenol can be used for isolation (Chomczynski & Sacchi, Anal. Biochem. 162: 156-159, 1987). After the tissue has been worked up by means of guanidinium isothiocyanate, RNA is extracted with acidic phenol, subsequently precipitated with isopropanol and taken up in DEPC-treated water.

[0259] 2-4 μg, of the RNA isolated in this way are subsequently transcribed into cDNA, for example by means of Superscript II (Invitrogen) according to the manufacturer's protocol. cDNA synthesis is primed with the aid of random hexamers (e.g. Roche Diagnostics) according to standard protocols of the relevant manufacturer. For quality control, the cDNAs are amplified over 30 cycles, using primers specific for the p53 gene which is expressed only lowly. Only p53-positive cDNA samples will be used for the subsequent reaction steps.

[0260] The targets are analyzed in detail by carrying out an expression analysis by means of PCR or quantitative PCR (qPCR) on the basis of a cDNA archive which has been isolated from various normal and tumor tissues and from tumor cell lines. For this purpose, 0.5 μl of cDNA of the above reaction mixture is amplified by a DNA polymerase (e.g. 1 U of HotStarTaq DNA polymerase, Qiagen) according to the protocols of the particular manufacturer (total volume of the reaction mixture: 25-50 μl). Aside from said polymerase, the amplification mixture comprises 0.3 mM dNTPs, reaction buffer (final concentration 1×, depending on the manufacturer of the DNA polymerase) and in each case 0.3 mM gene-specific “sense” and “antisense” primers.

[0261] The specific primers of the target gene are, as far as possible, selected in such a way that they are located in two different exons so that genomic contaminations do not lead to false-positive results. In a non-quantitative end point PCR, the cDNA is typically incubated at 95° C. for 15 minutes in order to denature the DNA and to activate the Hot-Start enzyme. Subsequently the DNA is amplified over 35 cycles (1 min at 95° C., 1 min at the primer-specific hybridization temperature (approx. 55-65° C.), 1 min at 72° C. to elongate the amplicons). Subsequently, 10 μl of the PCR mixture are applied to agarose gels and fractionated in the electric field. The DNA is made visible in the gels by staining with ethidium bromide and the PCR result is documented by way of a photograph.

[0262] As an alternative to conventional PCR, expression of a target gene may also be analyzed by quantitative real time PCR. Meanwhile various analytical systems are available for this analysis, of which the best known ones are the ABI PRISM sequence detection system (TaqMan, Applied Biosystems), the iCycler (Biorad) and the Light cycler (Roche Diagnostics). As described above, a specific PCR mixture is subjected to a run in the real time instruments. By adding a DNA-intercalating dye (e.g. ethidium bromide, CybrGreen), the newly synthesized DNA is made visible by specific light excitation (according to the dye manufacturers' information). A multiplicity of points measured during amplification enables the entire process to be monitored and the nucleic acid concentration of the target gene to be determined quantitatively. The PCR mixture is normalized by measuring a housekeeping gene (e.g. 18S RNA, β-actin). Alternative strategies via fluorescently labeled DNA probes likewise allow quantitative determination of the target gene of a specific tissue sample (see TaqMan applications from Applied Biosystems).

[0263] As shown in FIG. 1, placenta was confirmed in RT-PCR analyses as the only healthy tissue expressing the nucleic acid sequence according to SEQ ID NO:540. No significant expression was found in any other normal tissue. However, high and significant levels of expression were found in breast cancer.

[0264] Quantitative real-time RT-PCR analyses revealed that the nucleic acid sequence according to SEQ ID NO:540 was expressed in significant levels in the majority of breast cancer samples analyzed; cf. FIG. 2.

### 2. Cloning

[0265] The complete target gene which is required for further characterization of the tumor-associated marker is cloned according to common molecular-biological methods (e.g. in “Current Protocols in Molecular Biology”, John Wiley & Sons Ltd., Wiley InterScience). In order to clone the target gene or to analyze its sequence, said gene is first amplified by a DNA polymerase having a proof reading function (e.g. pfu, Roche Diagnostics). The amplicon is then ligated by standard methods into a cloning vector. Positive clones are identified by sequence analysis and subsequently characterized with the aid of prediction programs and known algorithms.

### 3. Prediction of the Protein

[0266] Genes found according to the invention (in particular those from the RefSeq XM domain) may require cloning of the full-length gene, determination of the open reading frame and deduction and analysis of the protein sequence.

[0267] In order to clone the full-length sequence, common protocols for the rapid amplification of cDNA ends and the screening of cDNA expression libraries with gene-specific probes may be used (Sambrook et al., Molecular Cloning: A Laboratory Manual, 2nd edition (1989), Cold Spring Harbor Laboratory Press, Cold Spring Harbor, N.Y.).

[0268] After assembling the fragments found in this way, potential open reading frames (ORF) can be predicted using common prediction programs. Since the position of the PolyA tail and of polyadenylation motifs predetermines the orientation of the potential gene product, only the 3 reading frames of that particular orientation remain out of a possible 6 reading frames. The former often yield only one sufficiently large open reading frame which may code for a protein, while the other reading frames have too many stop codons and would not code for any realistic protein. In the case of alternative open reading frames, identification of the authentic ORF is assisted by taking into account the Kozak criteria for optimal transcription initiation and by analyzing the deduced protein sequences which may arise. Said ORF is further verified by generating immune sera against proteins deduced from the potential ORFs and analyzing said immune sera for recognition of a real protein in tissues and cell lines.

### 4. Production of Antibodies

[0269] The tumor-associated antigens identified according to the invention are characterized, for example, by using antibodies. The invention further comprises the diagnostic or therapeutic use of antibodies. Antibodies may recognize proteins in the native and/or denatured state (Anderson et al., J. Immunol. 143: 1899-1904, 1989; Gardsvoll, J. Immunol. Methods 234: 107-116, 2000; Kayyem et al., Eur. J. Biochem. 208: 1-8, 1992; Spiller et al., J. Immunol. Methods 224: 51-60, 1999).

[0270] Antisera comprising specific antibodies which specifically bind to the target protein may be prepared by various standard methods; cf., for example, “Monoclonal Antibodies: A Practical Approach” by Phillip Shepherd, Christopher Dean ISBN 0-19-963722-9, “Antibodies: A Laboratory Manual” by Ed Harlow, David Lane ISBN: 0879693142 and “Using Antibodies: A Laboratory Manual: Portable Protocol NO” by Edward Harlow, David Lane, Ed Harlow ISBN: 0879695447. It is also possible here to generate affine and specific antibodies which recognize complex membrane proteins in their native form (Azorsa et al., J. Immunol. Methods 229: 35-48, 1999; Anderson et al., J. Immunol. 143: 1899-1904, 1989; Gardsvoll, J. Immunol. Methods. 234: 107-116, 2000). This is especially important in the preparation of antibodies which are intended to be used therapeutically but also for many diagnostic applications. For this purpose, both the complete protein and extracellular partial sequences may be used for immunization.

### Immunization and Production of Polyclonal Antibodies

[0271] Various immunization protocols are published. A species (e.g. rabbits, mice) is immunized by a first injection of the desired target protein. The immune response of the animal to the immunogen can be enhanced by a second or third immunization within a defined period of time (approx. 2-4 weeks after the previous immunization). Blood is taken from said animals and immune sera obtained, again after various defined time intervals (1st bleeding after 4 weeks, then every 2-3 weeks, up to 5 takings). The immune sera taken in this way comprise polyclonal antibodies which may be used to detect and characterize the target protein in Western blotting, by flow cytometry, immunofluorescence or immunohistochemistry.

[0272] The animals are usually immunized by any of four well-established methods, with other methods also in existence. The immunization may be carried out using peptides specific for the target protein, using the complete protein, or using extracellular partial sequences of a protein which can be identified experimentally or via prediction programs. Since the prediction programs do not always work perfectly, it is also possible to employ two domains separated from one another by a transmembrane domain. In this case, one of the two domains has to be extracellular, which may then be proved experimentally (see below). Immunization is offered commercially by different service providers.
[0273] (1) In the first case, peptides (length: 8-12 amino acids) are synthesized by in vitro methods (possibly carried out by a commercial service), and said peptides are used for immunization. Normally 3 immunizations are carried out (e.g. with a concentration of 5-100 μg/immunization).
[0274] (2) Alternatively, immunization may be carried out using recombinant proteins. For this purpose, the cloned DNA of the target gene is cloned into an expression vector and the target protein is synthesized, for example, cell-free in vitro, in bacteria (e.g. E. coli), in yeast (e.g. S. pombe), in insect cells or in mammalian cells, according to the conditions of the particular manufacturer (e.g. Roche Diagnostics, Invitrogen, Clontech, Qiagen). It is also possible to synthesize the target protein with the aid of viral expression systems (e.g. baculovirus, vacciniavirus, adenovirus). After it has been synthesized in one of said systems, the target protein is purified, normally by employing chromatographic methods. In this context, it is also possible to use for immunization proteins which have a molecular anchor as an aid for purification (e.g. His tag, Qiagen; FLAG tag, Roche Diagnostics; GST fusion proteins). A multiplicity of protocols can be found, for example, in “Current Protocols in Molecular Biology”, John Wiley & Sons Ltd., Wiley InterScience. After the target protein has been purified, an immunization is carried out as described above.
[0275] (3) If a cell line is available which synthesizes the desired protein endogenously, it is also possible to use this cell line directly for preparing the specific antiserum. In this case, immunization is carried out by 1-3 injections with in each case approx. 1−5×10⁷ cells.
[0276] (4) The immunization may also be carried out by injecting DNA (DNA immunization). For this purpose, the target gene is first cloned into an expression vector so that the target sequence is under the control of a strong eukaryotic promoter (e.g. CMV promoter). Subsequently, DNA (e.g. 1-10 μg per injection) is transferred as immunogen using a gene gun into capillary regions with a strong blood flow in an organism (e.g. mouse, rabbit). The transferred DNA is taken up by the animal's cells, the target gene is expressed, and the animal finally develops an immune response to the target protein (Jung et al., Mol. Cells 12: 41-49, 2001; Kasinrerk et al., Hybrid Hybridomics 21: 287-293, 2002).

### Production of Monoclonal Antibodies

[0277] Monoclonal antibodies are traditionally produced with the aid of the hybridoma technology (technical details: see “Monoclonal Antibodies: A Practical Approach” by Philip Shepherd, Christopher Dean ISBN 0-19-963722-9; “Antibodies: A Laboratory Manual” by Ed Harlow, David Lane ISBN: 0879693142, “Using Antibodies: A Laboratory Manual: Portable Protocol NO” by Edward Harlow, David Lane, Ed Harlow ISBN: 0879695447). A new method which is also used is the “SLAM” technology. Here, B cells are isolated from whole blood and the cells are made monoclonal. Subsequently the supernatant of the isolated B cell is analyzed for its antibody specificity. In contrast to the hybridoma technology, the variable region of the antibody gene is then amplified by single-cell PCR and cloned into a suitable vector. In this manner production of monoclonal antibodies is accelerated (de Wildt et al., J. Immunol. Methods 207:61-67, 1997).

### 5. Validation of the Targets by Protein-Chemical Methods Using Antibodies

[0278] The antibodies which can be produced as described above can be used to further analyse the target protein as follows:

### Specificity of the Antibody

[0279] Assays based on cell culture with subsequent Western blotting are most suitable for demonstrating the fact that an antibody binds specifically only to the desired target protein (various variations are described, for example, in “Current Protocols in Proteinchemistry”, John Wiley & Sons Ltd., Wiley InterScience). For the demonstration, cells are transfected with a cDNA for the target protein, which is under the control of a strong eukaryotic promoter (e.g. cytomegalovirus promoter; CMV). A wide variety of methods (e.g. electroporation, liposome-based transfection, calcium phosphate precipitation) are well established for transfecting cell lines with DNA (e.g. Lemoine et al., Methods Mol. Biol. 75: 441-7, 1997). As an alternative, it is also possible to use cell lines which express the target gene endogenously (detection via target gene-specific RT-PCR). As a control, in the ideal case, homologous genes are cotransfected in the experiment, in order to be able to demonstrate in the following Western blot the specificity of the analyzed antibody.

[0280] In the subsequent Western blotting, cells from cell culture or tissue samples which might contain the target protein are lysed in a 1% strength SDS solution, and the proteins are denatured in the process. The lysates are fractionated according to size by electrophoresis on 8-15% strength denaturing polyacrylamide gels (contain 1% SDS) (SDS polyacrylamide gel electrophoresis, SDS-PAGE). The proteins are then transferred by one of a plurality of blotting methods (e.g. semi-dry electroblot; Biorad) to a specific membrane (e.g. nitrocellulose, Schleicher & Schüll). The desired protein can be visualized on this membrane. For this purpose, the membrane is first incubated with the antibody which recognizes the target protein (dilution approx. 1:20-1:200, depending on the specificity of said antibody), for 60 minutes. After a washing step, the membrane is incubated with a second antibody which is coupled to a marker (e.g. enzymes such as peroxidase or alkaline phosphatase) and which recognizes the first antibody. It is then possible to make the target protein visible on the membrane in a color or chemiluminescent reaction (e.g. ECL, Amersham Bioscience). An antibody with a high specificity for the target protein should in the ideal case only recognise the desired protein itself.

### Localization of the Target Protein

[0281] Various methods are used to confirm the membrane localization, identified in the in silico approach, of the target protein. An important and well-established method using the antibodies described above is immunofluorescence (IF). For this purpose, cells of established cell lines which either synthesize the target protein (detection of the RNA by RT-PCR or of the protein by Western blotting) or else have been transfected with plasmid DNA are utilized. A wide variety of methods (e.g. electroporation, liposome-based transfection, calcium phosphate precipitation) are well established for transfection of cell lines with DNA (e.g. Lemoine et al., Methods Mol. Biol. 75: 441-7, 1997). The plasmid transfected into the cells, in immunofluorescence, may encode the unmodified protein or else couple different amino acid markers to the target protein. The principle markers are, for example, the fluorescent green fluorescent protein (GFP) in various differentially fluorescent forms, short peptide sequences of 6-12 amino acids for which high-affinity and specific antibodies are available, or the short amino acid sequence Cys-Cys-X-X-Cys-Cys which can bind via its cysteines specific fluorescent substances (Invitrogen). Cells which synthesize the target protein are fixed, for example, with paraformaldehyde or methanol. The cells may then, if required, be permeabilized by incubation with detergents (e.g. 0.2% Triton X-100). The cells are then incubated with a primary antibody which is directed against the target protein or against one of the coupled markers. After a washing step, the mixture is incubated with a second antibody coupled to a fluorescent marker (e.g. fluorescein, Texas Red, Dako), which binds to the first antibody. The cells labeled in this way are then overlaid with glycerol and analyzed with the aid of a fluorescence microscope according to the manufacturer's information. Specific fluorescence emissions are achieved in this case by specific excitation depending on the substances employed. The analysis usually permits reliable localization of the target protein, the antibody quality and the target protein being confirmed in double stainings with, in addition to the target protein, also the coupled amino acid markers or other marker proteins whose localization has already been described in the literature being stained. GFP and its derivatives represent a special case, being excitable directly and themselves fluorescing. The membrane permeability which may be controlled through the use of detergents, in immunofluorescence, allows demonstration of whether an immunogenic epitope is located inside or outside the cell. The prediction of the selected proteins can thus be supported experimentally. An alternative possibility is to detect extracellular domains by means of flow cytometry. For this purpose, cells are fixed under non-permeabilizing conditions (e.g. with PBS/Na azide/2% FCS/5 mM EDTA) and analyzed in a flow cytometer in accordance with the manufacturer's instructions. Only extracellular epitopes can be recognized by the antibody to be analyzed in this method. A difference from immunofluorescence is that it is possible to distinguish between dead and living cells by using, for example, propidium iodide or trypan blue, and thus avoid false-positive results.

[0282] Another important detection is by immunohistochemistry (IHC) on specific tissue samples. The aim of this method is to identify the localization of a protein in a functionally intact tissue aggregate. IHC serves specifically for (1) being able to estimate the amount of target protein in tumor and normal tissues, (2) analyzing how many cells in tumor and healthy tissues synthesize the target gene, and (3) defining the cell type in a tissue (tumor, healthy cells) in which the target protein is detectable. Alternatively, the amounts of protein of a target gene may be quantified by tissue immunofluorescence using a digital camera and suitable software (e.g. Tillvision, Till-photonics, Germany). The technology has frequently been published, and details of staining and microscopy can therefore be found, for example, in “Diagnostic Immunohistochemistry” by David J., MD Dabbs ISBN: 0443065667 or in “Microscopy, Immunohistochemistry, and Antigen Retrieval Methods: For Light and Electron Microscopy” ISBN: 0306467704. It should be noted that, owing to the properties of antibodies, different protocols have to be used (an example is described below) in order to obtain a meaningful result.

[0283] Normally, histologically defined tumor tissues and, as reference, comparable healthy tissues are employed in IHC. It is also possible to use as positive and negative controls cell lines in which the presence of the target gene is known through RT-PCR analyses. A background control must always be included.

[0284] Formalin-fixed (another fixation method, for example with methanol, is also possible) and paraffin-embedded tissue pieces with a thickness of 4 μm are applied to a glass support and deparaffinated with xylene, for example. The samples are washed with TBS-T and blocked in serum. This is followed by incubation with the first antibody (dilution: 1:2 to 1:2000) for 1-18 hours, with affinity-purified antibodies normally being used. A washing step is followed by incubation with a second antibody which is coupled to an alkaline phosphatase (alternative: for example peroxidase) and directed against the first antibody, for approx. 30-60 minutes. This is followed by a color reaction using alkaline phosphatase (cf., for example, Shi et al., J. Histochem. Cytochem. 39: 741-748, 1991; Shin et al., Lab. Invest. 64: 693-702, 1991). To demonstrate antibody specificity, the reaction can be blocked by previous addition of the immunogen.

### Analysis of Protein Modifications

[0285] Secondary protein modifications such as, for example, N- or O-glycosylations or myristilations may impair or even completely prevent the accessibility of immuno-genic epitopes and thus call into question the efficacy of antibody therapies. Moreover, it has frequently been demonstrated that the type and amount of secondary modifications differ in normal and tumor tissues (e.g. Durand & Seta, 2000; Clin. Chem. 46: 795-805; Hakomori, 1996; Cancer Res. 56: 5309-18). The analysis of these modifications is therefore essential to the therapeutic success of an antibody. Potential binding sites can be predicted by specific algorithms.

[0286] Analysis of protein modifications usually takes place by Western blotting (see above). Glycosylations which usually have a size of several kDa, especially lead to a larger total mass of the target protein, which can be fractionated in SDS-PAGE. To detect specific O- and N-glycosidic bonds, protein lysates are incubated prior to denaturation by SDS with O- or N-glycosylases (in accordance with their respective manufacturer's instructions, e.g. PNgase, endoglycosidase F, endo-glycosidase H, Roche Diagnostics). This is followed by Western blotting as described above. Thus, if there is a reduction in the size of a target protein after incubation with a glycosidase, it is possible to detect a specific glycosylation and, in this way, also analyze the tumor specificity of a modification.

### Functional Analysis of the Target Gene

[0287] The function of the target molecule may be crucial for its therapeutic usefulness, so that functional analyses are an important component in the characterization of therapeutically utilizable molecules. The functional analysis may take place either in cells in cell culture experiments or else in vivo with the aid of animal models. This involves either switching off the gene of the target molecule by mutation (knockout) or inserting the target sequence into the cell or the organism (knockin). Thus it is possible to analyze functional modifications in a cellular context firstly by way of the loss of function of the gene to be analyzed (loss of function). In the second case, modifications caused by addition of the analyzed gene can be analyzed (gain of function).

a. Functional Analysis in Cells

[0288] Transfection. In order to analyze the gain of function, the gene of the target molecule must be transferred into the cell. For this purpose, cells which allow synthesis of the target molecule are transfected with a DNA. Normally, the gene of the target molecule here is under the control of a strong eukaryotic promoter (e.g. cytomegalovirus promoter; CMV). A wide variety of methods (e.g. electroporation, liposome-based transfection, calcium phosphate precipitation) are well established for transfecting cell lines with DNA (e.g. Lemoine et al., Methods Mol. Biol. 75: 441-7, 1997). The gene may be synthesized either transiently, without genomic integration, or else stably, with genomic integration after selection with neomycin, for example.

[0289] RNA interference (siRNA). An inhibition of expression of the target gene, which may induce a complete loss of function of the target molecule in cells, may be generated by the RNA interference (siRNA) technology in cells (Hannon, G J. 2002. RNA interference. Nature 418: 244-51; Czauderna et al. 2003. Nucl. Acid Res. 31: 670-82). For this purpose, cells are transfected with short, double-stranded RNA molecules of approx. 20-25 nucleotides in length, which are specific for the target molecule. An enzymic process then results in degradation of the specific RNA of the target gene and thus in reduced expression of the target protein and consequently enables the target gene to be functionally analyzed.

[0290] Cell lines which have been modified by means of transfection or siRNA may subsequently be analyzed in different ways. The most common examples are listed below.

### 1. Proliferation and Cell Cycle Behavior

[0291] A multiplicity of methods for analyzing cell proliferation are established and are commercially supplied by various companies (e.g. Roche Diagnostics, Invitrogen; details of the assay methods are described in the numerous application protocols). The number of cells in cell culture experiments can be determined by simple counting or by colorimetric assays which measure the metabolic activity of the cells (e.g. wst-1, Roche Diagnostics). Metabolic assay methods measure the number of cells in an experiment indirectly via enzymic markers. Cell proliferation may be measured directly by analyzing the rate of DNA synthesis, for example by adding bromodeoxyuridine (BrdU), with the integrated BrdU being detected colorimetrically via specific antibodies.

### 2. Apoptosis and Cytotoxicity

[0292] A large number of assay systems for detecting cellular apoptosis and cytotoxicity are available. A decisive characteristic is the specific, enzyme-dependent fragmentation of genomic DNA, which is irreversible and in any case results in death of the cell. Methods for detecting these specific DNA fragments are commercially obtainable. An additional method available is the TUNEL assay which can detect DNA single-strand breaks also in tissue sections. Cytotoxicity is mainly detected via an altered cell permeability which serves as marker of the vitality state of cells. This involves on the one hand the analysis of markers which can typically be found intracellularly in the cell culture supernatant. On the other hand, it is also possible to analyze the absorbability of dye markers which are not absorbed by intact cells. The best-known examples of dye markers are Trypan blue and propidium iodide, a common intracellular marker is lactate dehydrogenase which can be detected enzymatically in the supernatant. Different assay systems of various commercial suppliers (e.g. Roche Diagnostics, Invitrogen) are available.

### 3. Migration Assay

[0293] The ability of cells to migrate is analyzed in a specific migration assay, preferably with the aid of a Boyden chamber (Corning Costar) (Cinamon G., Alon R. J. Immunol. Methods. 2003 February; 273(1-2):53-62; Stockton et al. 2001. Mol. Biol. Cell. 12: 1937-56). For this purpose, cells are cultured on a filter with a specific pore size. Cells which can migrate are capable of migrating through this filter into another culture vessel below. Subsequent microscopic analysis then permits determination of a possibly altered migration behavior induced by the gain of function or loss of function of the target molecule.

b. Functional Analysis in Animal Models

[0294] A possible alternative of cell culture experiments for the analysis of target gene function are complicated in vivo experiments in animal models. Compared to the cell-based methods, these models have the advantage of being able to detect faulty developments or diseases which are detectable only in the context of the whole organism. A multiplicity of models for human disorders are available by now (Abate-Shen & Shen. 2002. Trends in Genetics S1-5; Matsusue et al. 2003. J. Clin. Invest. 111:737-47). Various animal models such as, for example, yeast, nematodes or zebra fish have since been characterized intensively. However, models which are preferred over other species are mammalian animal models such as, for example, mice (Mus musculus) because they offer the best possibility of reproducing the biological processes in a human context. For mice, on the one hand transgenic methods which integrate new genes into the mouse genome have been established in recent years (gain of function; Jegstrup I. et al. 2003. Lab Anim. 2003 January; 37(1):1-9). On the other hand, other methodical approaches switch off genes in the mouse genome and thus induce a loss of function of a desired gene (knockout models, loss of function; Zambrowicz B P & Sands A T. 2003. Nat. Rev. Drug Discov. 2003 January; 2(1):38-51; Niwa H.2001. Cell Struct. Funct. 2001 June; 26(3):137-48); technical details have been published in large numbers.

[0295] After the mouse models have been generated, alterations induced by the transgene or by the loss of function of a gene can be analyzed in the context of the whole organism (Balling R, 2001. Ann. Rev. Genomics Hum. Genet. 2:463-92). Thus it is possible to carry out, for example, behavior tests as well as to biochemically study established blood parameters. Histological analyses, immunohistochemistry or electron microscopy enable alterations to be characterized at the cellular level. The specific expression pattern of a gene can be detected by in-situ hybridization (Peters T. et al. 2003. Hum. Mol. Genet. 12:2109-20).

### Example 3

### Detailed Analysis of the Identified Tumor-Associated Markers

### RNA-Isolation, RT-PCR and Real-Time RT-PCR

[0296] RNA extraction, first-strand cDNA synthesis, RT-PCR and real-time RT-PCR was performed as previously described (Koslowski, M. et al., Cancer Res. 62, 6750-6755 (2002), Koslowski, M. et al., Cancer Res. 64, 5988-5993 (2004)). Real-time quantitative expression analysis was performed in a 40 cycle RT-PCR. After normalization to HPRT (sense 5′-TGA CAC TGG CAA AAC AAT GCA-3′; antisense 5′-GGT CCT TTT CAC CAG CAA GCT-3′, 62° C. annealing) gene-specific transcripts in tumor samples were quantified relative to normal tissues using ΔΔCT calculation.

siRNA Duplexes

[0297] The SEQ ID NO:540 siRNA duplexes (Qiagen, Hilden, Germany) were directed against target sequences 5′-NNC CAC AGA AGG UAC CAG UUA-3′ (siRNA#1; sense (5′-CCA CAG AAG GUA CCA GUU AUU-3′), antisense (5′-UAA CUG GUA CCU UCU GUG GUU-3′) and 5′-NNC AGC AAG ACU CCC UCU AAA-3′ (siRNA#2; sense (5′-CAG CAA GAC UCC CUC UAA AUU-3′), antisense (5′-UUU AGA GGG AGU CUU GCU GUU-3′) of the SEQ ID NO:540 mRNA sequence.

### Cell Proliferation Analysis

[0298] 24 h after transfection with siRNA duplexes 1×10⁴ cells were cultured for 48 h in medium supplemented with 10% FCS. Proliferation was analyzed by measuring the incorporation of BrdU into newly synthesized DNA strands using the DELFIA cell proliferation Kit (Perkin Elmer, Boston, Mass.) according to the manufacturer's instructions on a Wallac Victor² multi-label counter (Perkin Elmer, Boston, Mass.).

[0299] FIG. 3 shows the quantification of SEQ ID NO:540 mRNA expression in MCF-7 breast cancer cells by real-time RT-PCR 24 h after transfection with siRNA oligos. Compared to non-transfected cells and cells transfected with non-silencing (ns) siRNA both SEQ ID NO:540-specific siRNAs (siRNA#1 (SEQ ID NO:630, 631), siRNA#2 (SEQ ID NO:632, 633)) induce robust silencing of SEQ ID NO:540 expression.

[0300] FIG. 4 shows that silencing of SEQ ID NO:540 expression by transfection with siRNA oligos results in impaired proliferation of MCF-7 breast cancer cells. Proliferation was quantified 96 h after transfection with siRNAs by measuring incorporation of BrdU in newly synthesized DNA strands. These results show that SEQ ID NO:540 is a positive factor for the proliferation of breast cancer cells.

[0301] The nucleotide sequence according to SEQ ID NO:541 was deduced from SEQ ID NO:65 and codes for a 177 aa protein (SEQ ID NO:542) of unknown function. Expression of SEQ ID NO:541 in normal and cancerous tissues was quantified by real-time RT-PCR using sequence-specific oligos (SEQ ID NO:543, 544); see FIG. 5. In normal tissues SEQ ID NO:541 is highly expressed in placenta and shows only weak expression in thymus. SEQ ID NO:541 is overexpressed in lung cancer. Based on these expression results, SEQ ID NO:541 and its expression products qualify as molecular markers and/or target candidates for targeted therapies, in particular for this particular tumor type.

[0302] The nucleotide sequence according to SEQ ID NO:545 was deduced from SEQ ID NO:249 and codes for a member of the solute carrier (SLC) group of membrane proteins (SEQ ID NO:546). As is typical of integral membrane proteins, SLCs contain a number of hydrophobic transmembrane alpha helices connected to each other by hydrophilic intra- or extra-cellular loops. Depending on the SLC, these transporters are functional as either monomers or obligate homo- or hetero-oligomers. The protein encoded by SEQ ID NO:545 is a cell surface protein. Expression of SEQ ID NO:545 in normal and cancerous tissues was quantified by real-time RT-PCR using sequence-specific oligos (SEQ ID NO:547, 548); see FIG. 6. Compared to normal tissues, SEQ ID NO:545 is overexpressed in malignant melanomas. Based on these expression results, SEQ ID NO:545 and its expression products qualify as molecular markers and/or target candidates for targeted therapies, in particular for this particular tumor type.

[0303] The nucleotide sequence according to SEQ ID NO:549 was deduced from SEQ ID NO:4 and codes for a 763 aa protein (SEQ ID NO:550) of unknown function. The protein harbors two potential transmembrane domains and a typical fibronectin type III domain. Fibronectin is a high-molecular-weight extracellular matrix glycoprotein that binds to membrane spanning receptor proteins (integrins). In addition to integrins, they also bind extracellular matrix components such as collagen, fibrin and heparan sulfate. The protein encoded by SEQ ID NO:549 might represent a hitherto unknown new fibronection-like protein. Expression of SEQ ID NO:549 in normal and cancerous tissues was quantified by real-time RT-PCR using sequence-specific oligos (SEQ ID NO:551, 552); see FIG. 7. Compared to normal tissues, SEQ ID NO:549 is overexpressed in ovarian cancer. Based on these expression results, SEQ ID NO:549 and its expression products qualify as molecular markers and/or target candidates for targeted therapies, in particular of this particular tumor type.

[0304] The nucleotide sequence according to SEQ ID NO:553 was deduced from SEQ ID NO:156 and codes for a 496 aa protein (SEQ ID NO:554) of unknown function. The protein harbors a potential transmembrane protein. Expression of SEQ ID NO:553 in normal and cancerous tissues was quantified by real-time RT-PCR using sequence-specific oligos (SEQ ID NO:555, 556); see FIG. 8. In normal tissues SEQ ID NO:553 is highly expressed in placenta. Compared to other normal tissues, SEQ ID NO:553 is overexpressed in colon cancer and ovarian cancer. Based on these expression results, SEQ ID NO:553 and its expression products qualify as molecular markers and/or target candidates for targeted therapies, in particular for these particular tumor types.

[0305] The nucleotide sequence according to SEQ ID NO:557 was deduced from SEQ ID NO:273. SEQ ID NO:557 represents a partial cDNA with no apparent open reading frame. Expression of SEQ ID NO:557 in normal and cancerous tissues was quantified by real-time RT-PCR using sequence-specific oligos (SEQ ID NO:558, 559); see FIG. 9. In normal tissues high expression of SEQ ID NO:557 is detectable in breast. Compared to normal tissues, SEQ ID NO:557 is overexpressed in breast cancer. Based on these expression results, SEQ ID NO:557 and its expression products qualify as molecular markers and/or target candidates for targeted therapies, in particular for this particular tumor type.

[0306] The nucleotide sequence according to SEQ ID NO:560 was deduced from SEQ ID NO:135. SEQ ID NO:560 has no apparent open reading frame. Expression of SEQ ID NO:560 in normal and cancerous tissues was quantified by real-time RT-PCR using sequence-specific oligos (SEQ ID NO:561, 562); see FIG. 10. In normal tissues expression of SEQ ID NO:560 is detectable in duodenum and colon. Compared to normal tissues, SEQ ID NO:560 is overexpressed in colon cancer and ovarian cancer. Based on these expression results, SEQ ID NO:560 and its expression products qualify as molecular markers and/or target candidates for targeted therapies, in particular for these particular tumor types.

[0307] The nucleotide sequence according to SEQ ID NO:563 was deduced from SEQ ID NO:177. SEQ ID NO:563 has no apparent open reading frame. Expression of SEQ ID NO:563 in normal and cancerous tissues was quantified by real-time RT-PCR using sequence-specific oligos (SEQ ID NO:564, 565); see FIG. 11. SEQ ID NO:563 is highly expressed in placenta. Compared to normal tissues, SEQ ID NO:563 is overexpressed in breast cancer, colon cancer, ovarian cancer, lung cancer and melanoma. Based on these expression results, SEQ ID NO:563 and its expression products qualify as molecular markers and/or target candidates for targeted therapies, in particular for these particular tumor types.

[0308] The nucleotide sequence according to SEQ ID NO:566 was deduced from SEQ ID NO:149 and codes for a 155 aa protein (SEQ ID NO:567) of unknown function. The protein sequence is partially homologous to members of the tumor necrosis factor receptor superfamily and harbors a potential transmembrane domain. The protein encoded by SEQ ID NO:566 might represent a new member of the tumor necrosis factor receptor superfamily. Expression of SEQ ID NO:566 in normal and cancerous tissues was quantified by real-time RT-PCR using sequence-specific oligos (SEQ ID NO:568, 569); see FIG. 12. Compared to normal tissues, SEQ ID NO:566 is overexpressed in gastric cancer, breast cancer, colon cancer, ovarian cancer, lung cancer and melanoma. Based on these expression results, SEQ ID NO:566 and its expression products qualify as molecular markers and/or target candidates for targeted therapies, in particular for these particular tumor types.

[0309] The nucleotide sequence according to SEQ ID NO:570 was deduced from SEQ ID NO:53 and codes for a member of the kernel lipocain superfamily (SEQ ID NO:571). These secreted glycoproteins have distinct and essential roles in regulating an uterine environment suitable for pregnancy and in the timing and occurrence of the appropriate sequence of events in the fertilization process. Expression of SEQ ID NO:570 in normal and cancerous tissues was quantified by real-time RT-PCR using sequence-specific oligos (SEQ ID NO:572, 573); see FIG. 13. SEQ ID NO:570 is highly expressed in placenta. Compared to other normal tissues, SEQ ID NO:570 is overexpressed in ovarian cancer, lung cancer and melanoma. Based on these expression results, SEQ ID NO:570 and its expression products qualify as molecular markers and/or target candidates for targeted therapies, in particular for these particular tumor types.

[0310] The nucleotide sequence according to SEQ ID NO:574 has no apparent open reading frame. Expression of SEQ ID NO:574 in normal and cancerous tissues was quantified by real-time RT-PCR using sequence-specific oligos (SEQ ID NO:575, 576); see FIG. 14. SEQ ID NO:574 is highly expressed in placenta. Compared to other normal tissues, SEQ ID NO:574 is overexpressed in lung cancer and melanoma. Based on these expression results, SEQ ID NO:574 and its expression products qualify as molecular markers and/or target candidates for targeted therapies, in particular for these particular tumor types.

[0311] The nucleotide sequence according to SEQ ID NO:577 was deduced from SEQ ID NO:20. SEQ ID NO:577 represents a partial cDNA with no apparent open reading frame. Expression of SEQ ID NO:577 in normal and cancerous tissues was quantified by real-time RT-PCR using sequence-specific oligos (SEQ ID NO:578, 579); see FIG. 15. SEQ ID NO:577 is highly expressed in placenta. Compared to other normal tissues, SEQ ID NO:577 is overexpressed in gastric cancer, breast cancer and lung cancer. Based on these expression results, SEQ ID NO:577 and its expression products qualify as molecular markers and/or target candidates for targeted therapies, in particular for these particular tumor types.

[0312] The nucleotide sequence according to SEQ ID NO:580 was deduced from SEQ ID NO:32. SEQ ID NO:580 represents a partial cDNA with no apparent open reading frame. Expression of SEQ ID NO:580 in normal and cancerous tissues was quantified by real-time RT-PCR using sequence-specific oligos (SEQ ID NO:581, 582); see FIG. 16. SEQ ID NO:580 is highly expressed in placenta. Compared to other normal tissues, SEQ ID NO:580 is overexpressed in ovarian cancer and lung cancer. Based on these expression results, SEQ ID NO:580 and its expression products qualify as molecular markers and/or target candidates for targeted therapies, in particular for these particular tumor types.

[0313] The nucleotide sequence according to SEQ ID NO:583 was deduced from SEQ ID NO:257 and codes for a member of the homeobox class of transcription factors (SEQ ID NO:584). Expression of these proteins is spatially and temporally regulated during embryonic development. Expression of SEQ ID NO:583 in normal and cancerous tissues was quantified by real-time RT-PCR using sequence-specific oligos (SEQ ID NO:585, 586); see FIG. 17. SEQ ID NO:583 is highly expressed in placenta and prostate. Compared to other normal tissues, SEQ ID NO:583is overexpressed in colon cancer, ovarian cancer and lung cancer. Based on these expression results, SEQ ID NO:583 and its expression products qualify as molecular markers and/or target candidates for targeted therapies, in particular for these particular tumor types.

[0314] The nucleotide sequence according to SEQ ID NO:587 was deduced from SEQ ID NO:148 and codes for a member of the IGF-II mRNA-binding protein (IMP) family (SEQ ID NO:588). It functions by binding to the 5′ UTR of the insulin-like growth factor 2 (IGF2) mRNA and regulating IGF2 translation. Expression of SEQ ID NO:587 in normal and cancerous tissues was quantified by real-time RT-PCR using sequence-specific oligos (SEQ ID NO:589, 590); see FIG. 18. Compared to normal tissues, SEQ ID NO:587 is overexpressed in lung cancer. Based on these expression results, SEQ ID NO:587 and its expression products qualify as molecular markers and/or target candidates for targeted therapies, in particular for this particular tumor type.

[0315] The nucleotide sequence according to SEQ ID NO:591 was deduced from SEQ ID NO:194 and codes for a 372 aa protein (SEQ ID NO:592) of unknown function. Expression of SEQ ID NO:591 in normal and cancerous tissues was quantified by real-time RT-PCR using sequence-specific oligos (SEQ ID NO:593, 594); see FIG. 19. SEQ ID NO:591 is highly expressed in testis. Compared to other normal tissues, SEQ ID NO:591 is overexpressed in breast cancer, colon cancer, ovarian cancer, lung cancer and melanoma. Based on these expression results, SEQ ID NO:591 and its expression products qualify as molecular markers and/or target candidates for targeted therapies, in particular for these particular tumor types.

[0316] The nucleotide sequence according to SEQ ID NO:595 was deduced from SEQ ID NO:191 and codes for a 357 aa protein (SEQ ID NO:596) of unknown function. Expression of SEQ ID NO:595 in normal and cancerous tissues was quantified by real-time RT-PCR using sequence-specific oligos (SEQ ID NO:597, 598); see FIG. 20. SEQ ID NO:595 is highly expressed in testis. Compared to other normal tissues, SEQ ID NO:595 is overexpressed in gastric cancer, colon cancer, ovarian cancer, lung cancer and melanoma. Based on these expression results, SEQ ID NO:595 and its expression products qualify as molecular markers and/or target candidates for targeted therapies, in particular for these particular tumor types.

[0317] The nucleotide sequence according to SEQ ID NO:599 was deduced from SEQ ID NO:18 and has no apparent open reading frame. Expression of SEQ ID NO:599 in normal and cancerous tissues was quantified by real-time RT-PCR using sequence-specific oligos (SEQ ID NO:600, 601); see FIG. 21. SEQ ID NO:599 is highly expressed in placenta. Compared to other normal tissues, SEQ ID NO:599 is overexpressed in gastric cancer, breast cancer, lung cancer and melanoma. Based on these expression results, SEQ ID NO:599 and its expression products qualify as molecular markers and/or target candidates for targeted therapies, in particular for these particular tumor types.

[0318] The nucleotide sequence according to SEQ ID NO:602 was deduced from SEQ ID NO:133 and codes for a member of the von Willebrand factor domain superfamily of extracellular matrix proteins (SEQ ID NO:603). Expression of SEQ ID NO:602 in normal and cancerous tissues was quantified by real-time RT-PCR using sequence-specific oligos (SEQ ID NO:604, 605); see FIG. 22. Compared to normal tissues, SEQ ID NO:602 is overexpressed in ovarian cancer and lung cancer. Based on these expression results, SEQ ID NO:602 and its expression products qualify as molecular markers and/or target candidates for targeted therapies, in particular for these particular tumor types.

[0319] The nucleotide sequence according to SEQ ID NO:606 was deduced from SEQ ID NO:128 and codes for a member of the Borg family of CDC42 effector proteins (SEQ ID NO:607). Borg family proteins contain a CRIB (Cdc42/Rac interactive-binding) domain. They bind to, and negatively regulate the function of CDC42. CDC42, a small Rho GTPase, regulates the formation of F-actin-containing structures through its interaction with the downstream effector proteins. Expression of SEQ ID NO:606 in normal and cancerous tissues was quantified by real-time RT-PCR using sequence-specific oligos (SEQ ID NO:608, 609); see FIG. 23. Compared to normal tissues, SEQ ID NO:606 is overexpressed in gastric cancer, colon cancer and lung cancer. Based on these expression results, SEQ ID NO:606 and its expression products qualify as molecular markers and/or target candidates for targeted therapies, in particular for these particular tumor types.

[0320] The nucleotide sequence according to SEQ ID NO:610 was deduced from SEQ ID NO:118 and has no apparent open reading frame. Expression of SEQ ID NO:610 in normal and cancerous tissues was quantified by real-time RT-PCR using sequence-specific oligos (SEQ ID NO:611, 612); see FIG. 24. Compared to normal tissues, SEQ ID NO:610 is overexpressed in gastric cancer, breast cancer and lung cancer. Based on these expression results, SEQ ID NO:610 and its expression products qualify as molecular markers and/or target candidates for targeted therapies, in particular for these particular tumor types.

[0321] The nucleotide sequence according to SEQ ID NO:613 was deduced from SEQ ID NO:116 and codes for a 76 aa protein (SEQ ID NO:614) of unknown function. Expression of SEQ ID NO:613 in normal and cancerous tissues was quantified by real-time RT-PCR using sequence-specific oligos (SEQ ID NO:615, 616); see FIG. 25. SEQ ID NO:613 is highly expressed in placenta. Compared to other normal tissues, SEQ ID NO:613 is overexpressed in breast cancer, lung cancer and melanoma. Based on these expression results, SEQ ID NO:613 and its expression products qualify as molecular markers and/or target candidates for targeted therapies, in particular for these particular tumor types.

[0322] The nucleotide sequence according to SEQ ID NO:617 was deduced from SEQ ID NO:267. SEQ ID NO:617 represents a partial cDNA with no apparent open reading frame. Expression of SEQ ID NO:617 in normal and cancerous tissues was quantified by real-time RT-PCR using sequence-specific oligos (SEQ ID NO:618, 619); see FIG. 26. SEQ ID NO:617 is highy expressed in placenta and endometrium. Compared to other normal tissues, SEQ ID NO:617 is overexpressed in lung cancer and melanoma. Based on these expression results, SEQ ID NO:617 and its expression products qualify as molecular markers and/or target candidates for targeted therapies, in particular for these particular tumor types.

[0323] The nucleotide sequence according to SEQ ID NO:620 was deduced from SEQ ID NO:182 and codes for a 829 aa protein (SEQ ID NO:621) harboring multiple putative transmembrane domains and a patched family domain. The transmembrane protein Patched is a receptor for the morphogene Sonic Hedgehog. This protein associates with the smoothened protein to transduce hedgehog signals. SEQ ID NO:620 might represent a novel member of the Patched family. Expression of SEQ ID NO:620 in normal and cancerous tissues was quantified by real-time RT-PCR using sequence-specific oligos (SEQ ID NO:622, 623); see FIG. 27. SEQ ID NO:620 is highly expressed in lung. Compared to other normal tissues, SEQ ID NO:620 is overexpressed in ovarian cancer and melanoma. Based on these expression results, SEQ ID NO:620 and its expression products qualify as molecular markers and/or target candidates for targeted therapies, in particular for these particular tumor types.

[0324] The nucleotide sequence according to SEQ ID NO:624 was deduced from SEQ ID NO:184 and codes for a 323 aa protein (SEQ ID NO:625) similar to TWIK-related acid-sensitive K⁺ channel, a member of the superfamily of potassium channel proteins that contain two pore-forming P domains. Expression of SEQ ID NO:624 in normal and cancerous tissues was quantified by real-time RT-PCR using sequence-specific oligos (SEQ ID NO:626, 627); see FIG. 28. SEQ ID NO:624 is highly expressed in lung. Compared to other normal tissues, SEQ ID NO:624 is overexpressed in gastric cancer and lung cancer. Based on these expression results, SEQ ID NO:624 and its expression products qualify as molecular markers and/or target candidates for targeted therapies, in particular for these particular tumor types.

[0325] The nucleotide sequence according to SEQ ID NO:634 was deduced from SEQ ID NO:346 and codes for a member of the homeobox class of transcription factors (SEQ ID NO:635). Expression of these proteins is spatially and temporally regulated during embryonic development. Expression of SEQ ID NO:634 in normal and cancerous tissues was quantified by real-time RT-PCR using sequence-specific oligos (SEQ ID NO:636, 637); see FIG. 29. SEQ ID NO:634 is highly expressed in placenta and endometrium. Compared to other normal tissues, SEQ ID NO:634 is overexpressed in ovarian cancer and lung cancer. Based on these expression results SEQ ID NO:634 and its expression products qualify as molecular markers and/or target candidates for targeted therapies, in particular for these particular tumor types.

[0326] The nucleotide sequence according to SEQ ID NO:638 was deduced from SEQ ID NO:252 and codes for a member of the F-box protein family (SEQ ID NO:639) which is characterized by an approximately 40 amino acid motif, the F-box. The F-box proteins constitute one of the four subunits of ubiquitin protein ligase complex called SCFs (SKP1-cullin-F-box), which function in phosphorylation-dependent ubiquitination. The F-box proteins are divided into 3 classes: Fbws containing WD-40 domains, Fbls containing leucine-rich repeats, and Fbxs containing either different protein-protein interaction modules or no recognizable motifs. The protein encoded by this gene belongs to the Fbls class; in addition to an F-box, this protein contains 10 tandem leucine-rich repeats. This protein is an essential element of the cyclin A-CDK2 S-phase kinase. It specifically recognizes phosphorylated cyclin-dependent kinase inhibitor 1B (CDKN1B, also referred to as p27 or KIP1) predominantly in S phase and interacts with S-phase kinase-associated protein 1 (SKP1 or p19). Expression of SEQ ID NO:638 in normal and cancerous tissues was quantified by real-time RT-PCR using sequence-specific oligos (SEQ ID NO:640, 641); see FIG. 30. SEQ ID NO:638 is highly expressed in placenta. Compared to normal tissues, SEQ ID NO:638 is overexpressed in colon cancer, ovarian cancer, lung cancer, and malignant melanomas. Based on these expression results SEQ ID NO:638 and its expression products qualify as molecular markers and/or target candidates for targeted therapies, in particular for these particular tumor types.

[0327] The nucleotide sequence according to SEQ ID NO:642 was deduced from SEQ ID NO:248 and codes for a 1.024 aa protein (SEQ ID NO:643) of unknown function. Expression of SEQ ID NO:642 in normal and cancerous tissues was quantified by real-time RT-PCR using sequence-specific oligos (SEQ ID NO:644, 645); see FIG. 31. SEQ ID NO:642 is highly expressed in placenta. Compared to normal tissues, SEQ ID NO:642 is overexpressed in breast cancer, ovarian cancer, lung cancer, and malignant melanomas. Based on these expression results SEQ ID NO:642 and its expression products qualify as molecular markers and/or target candidates for targeted therapies, in particular of these particular tumor types.

[0328] The nucleotide sequence according to SEQ ID NO:646 was deduced from SEQ ID NO:269. SEQ ID NO:646 represents a partial cDNA with no apparent open reading frame. Expression of SEQ ID NO:646 in normal and cancerous tissues was quantified by real-time RT-PCR using sequence-specific oligos (SEQ ID NO:647, 648); see FIG. 32. SEQ ID NO:646 is expressed in placenta. Compared to normal tissues, SEQ ID NO:646 is overexpressed in gastric cancer, ovarian cancer, and lung cancer. Based on these expression results SEQ ID NO:646 and its expression products qualify as molecular markers and/or target candidates for targeted therapies, in particular for these particular tumor types.

[0329] The nucleotide sequence according to SEQ ID NO:649 was deduced from SEQ ID NO:27 and codes for a 258 aa protein (SEQ ID NO:650) of unknown function. Expression of SEQ ID NO:649 in normal and cancerous tissues was quantified by real-time RT-PCR using sequence-specific oligos (SEQ ID NO:651, 652); cf. FIG. 33. SEQ ID NO:649 is highly expressed in placenta. Compared to normal tissues, SEQ ID NO:649 is overexpressed in ovarian cancer, lung cancer, and malignant melanomas. Based on these expression results SEQ ID NO:649 and its expression products qualify as molecular markers and/or target candidates for targeted therapies, in particular for these particular tumor types.

[0330] The nucleotide sequence according to SEQ ID NO:653 was deduced from SEQ ID NO:139. SEQ ID NO:653 represents a partial cDNA with no apparent open reading frame. Expression of SEQ ID NO:653 in normal and cancerous tissues was quantified by real-time RT-PCR using sequence-specific oligos (SEQ ID NO:654, 655); see FIG. 34. SEQ ID NO:653 is expressed in placenta and skin. Compared to other normal tissues, SEQ ID NO:653 is overexpressed in colon cancer, and lung cancer. Based on these expression results SEQ ID NO:653 and its expression products qualify as molecular markers and/or target candidates for targeted therapies, in particular for these particular tumor types.

[0331] The nucleotide sequence according to SEQ ID NO:656 was deduced from SEQ ID NO:305 and codes for a 419 aa protein (SEQ ID NO:657) of unknown function. Expression of SEQ ID NO:656 in normal and cancerous tissues was quantified by real-time RT-PCR using sequence-specific oligos (SEQ ID NO:658, 659); see FIG. 35. SEQ ID NO:656 is expressed in placenta and skin. Compared to other normal tissues, SEQ ID NO:656 is overexpressed in lung cancer, and malignant melanomas. Based on these expression results SEQ ID NO:656 and its expression products qualify as molecular markers and/or target candidates for targeted therapies, in particular for these particular tumor types.

[0332] The nucleotide sequence according to SEQ ID NO:660 was deduced from SEQ ID NO:125 and codes for a a disintegrin and metalloproteinase with thrombospondin motif (SEQ ID NO:661). Expression of SEQ ID NO:660 in normal and cancerous tissues was quantified by real-time RT-PCR using sequence-specific oligos (SEQ ID NO:662, 663); see FIG. 36. SEQ ID NO:660 is highly expressed in placenta. Compared to normal tissues, SEQ ID NO:660 is overexpressed in gastric cancer, ovarian cancer, and malignant melanomas. Based on these expression results SEQ ID NO:660 and its expression products qualify as molecular markers and/or target candidates for targeted therapies, in particular for these particular tumor types.

[0333] The nucleotide sequence according to SEQ ID NO:664 was deduced from SEQ ID NO:61 and codes for a 334 aa protein (SEQ ID NO:665) of unknown function. Expression of SEQ ID NO:664 in normal and cancerous tissues was quantified by real-time RT-PCR using sequence-specific oligos (SEQ ID NO:666, 667); see FIG. 37. SEQ ID NO:664 is expressed in placenta and skin. Compared to other normal tissues, SEQ ID NO:664 is overexpressed in gastric cancer, colon cancer, lung cancer, and malignant melanomas. Based on these expression results SEQ ID NO:664 and its expression products qualify as molecular markers and/or target candidates for targeted therapies, in particular for these particular tumor types.

[0334] The nucleotide sequence according to SEQ ID NO:668 was deduced from SEQ ID NO:13. SEQ ID NO:668 represents a partial cDNA with no apparent open reading frame. Expression of SEQ ID NO:668 in normal and cancerous tissues was quantified by real-time RT-PCR using sequence-specific oligos (SEQ ID NO:669, 670); see FIG. 38. SEQ ID NO:668 is highly expressed in placenta. Compared to other normal tissues, SEQ ID NO:668 is overexpressed in lung cancer. Based on these expression results SEQ ID NO:668 and its expression products qualify as molecular markers and/or target candidates for targeted therapies, in particular for this particular tumor type.

[0335] The nucleotide sequence according to SEQ ID NO:671 was deduced from SEQ ID NO:42 and codes for a 426 aa protein (SEQ ID NO:672) of unknown function. Expression of SEQ ID NO:671 in normal and cancerous tissues was quantified by real-time RT-PCR using sequence-specific oligos (SEQ ID NO:673, 674); see FIG. 39. SEQ ID NO:671 is expressed in placenta and skin. Compared to other normal tissues, SEQ ID NO:671 is overexpressed in lung cancer, and malignant melanomas. Based on these expression results SEQ ID NO:671 and its expression products qualify as molecular markers and/or target candidates for targeted therapies, in particular for these particular tumor types.

[0336] The nucleotide sequence according to SEQ ID NO:675 was deduced from SEQ ID NO:314 and codes for a 2.912 aa protein (SEQ ID NO:676). Expression of SEQ ID NO:675 in normal and cancerous tissues was quantified by real-time RT-PCR using sequence-specific oligos (SEQ ID NO:677, 678); see FIG. 40. SEQ ID NO:675 is highly expressed in placenta. Compared to other normal tissues, SEQ ID NO:675 is overexpressed in lung cancer, and malignant melanomas. Based on these expression results SEQ ID NO:675 and its expression products qualify as molecular markers and/or target candidates for targeted therapies, in particular for these particular tumor types.

[0337] The nucleotide sequence according to SEQ ID NO:679 was deduced from SEQ ID NO:31. SEQ ID NO:679 represents a partial cDNA with no apparent open reading frame. Expression of SEQ ID NO:679 in normal and cancerous tissues was quantified by real-time RT-PCR using sequence-specific oligos (SEQ ID NO:680, 681); see FIG. 41. SEQ ID NO:679 is highly expressed in placenta. Compared to other normal tissues, SEQ ID NO:679 is overexpressed in lung cancer. Based on these expression results SEQ ID NO:679 and its expression products qualify as molecular markers and/or target candidates for targeted therapies, in particular for this particular tumor type.

[0338] The nucleotide sequence according to SEQ ID NO:682 was deduced from SEQ ID NO:21 and codes for a 278 aa protein (SEQ ID NO:683). Expression of SEQ ID NO:682 in normal and cancerous tissues was quantified by real-time RT-PCR using sequence-specific oligos (SEQ ID NO:684, 685); see FIG. 42. SEQ ID NO:682 is highly expressed in placenta, endometrium, and at lower levels in lymph node. Compared to other normal tissues SEQ ID NO:682 is overexpressed in gastric cancer, breast cancer, and malignant melanomas. Based on these expression results SEQ ID NO:682 and its expression products qualify as molecular markers and/or target candidates for targeted therapies, in particular for these particular tumor types.

[0339] The nucleotide sequence according to SEQ ID NO:686 was deduced from SEQ ID NO:58. SEQ ID NO:686 represents a partial cDNA with no apparent open reading frame. Expression of SEQ ID NO:686 in normal and cancerous tissues was quantified by real-time RT-PCR using sequence-specific oligos (SEQ ID NO:687, 688); see FIG. 43. SEQ ID NO:686 is highly expressed in placenta and at lower levels in breast. Compared to other normal tissues, SEQ ID NO:686 is overexpressed in breast cancer, ovarian cancer, and lung cancer. Based on these expression results SEQ ID NO:686 and its expression products qualify as molecular markers and/or target candidates for targeted therapies, in particular for these particular tumor types.

1. A pharmaceutical composition, comprising an agent which
(I) inhibits expression or activity of a tumor-associated antigen and/or
(II) has tumor-inhibiting activity, and is selective for cells expressing or abnormally expressing a nucleic acid coding for a tumor-associated antigen or a tumor-associated antigen and/or
(III) when administered, selectively increases the amount of complexes between an MHC molecule and a tumor-associated antigen or a part thereof,
said tumor-associated antigen having a sequence encoded by a nucleic acid which is selected from the group consisting of:
(a) a nucleic acid which comprises a nucleic acid sequence selected from the group consisting of SEQ ID NOs: 634, 1-540, 541, 545, 549, 553, 557, 560, 563, 566, 570, 574, 577, 580, 583, 587, 591, 595, 599, 602, 606, 610, 613, 617, 620, 624, 638, 642, 646, 649, 653, 656, 660, 664, 668, 671, 675, 679, 682, and 686, a part or derivative thereof,
(b) a nucleic acid which hybridizes with the nucleic acid of (a) under stringent conditions,
(c) a nucleic acid which is degenerate with respect to the nucleic acid of (a) or (b), and
(d) a nucleic acid which is complementary to the nucleic acid of (a), (b) or (c).

2. The pharmaceutical composition as claimed in claim 1, in which the agent under (I) or (II) is an antisense nucleic acid which hybridizes selectively with the nucleic acid coding for the tumor-associated antigen or is an antibody which binds selectively to the tumor-associated antigen.

3. The pharmaceutical composition as claimed in claim 1, in which the agent comprises one or more components selected from the group consisting of:
(i) the tumor-associated antigen or a part thereof,
(ii) a nucleic acid which codes for the tumor-associated antigen or a part thereof,
(iii) an antibody which binds to the tumor-associated antigen or a part thereof,
(iv) an antisense nucleic acid which hybridizes specifically with a nucleic acid coding for the tumor-associated antigen,
(v) an siRNA directed against a nucleic acid coding for the tumor-associated antigen,
(vi) a host cell which expresses the tumor-associated antigen or a part thereof, and
(vii) isolated complexes between the tumor-associated antigen or a part thereof and an MHC molecule.

4. A pharmaceutical composition, comprising one or more components selected from the group consisting of:
(i) a tumor-associated antigen or a part thereof,
(ii) a nucleic acid which codes for a tumor-associated antigen or a part thereof,
(iii) an antibody which binds to a tumor-associated antigen or a part thereof,
(iv) an antisense nucleic acid which hybridizes specifically with a nucleic acid coding for a tumor-associated antigen,
(v) an siRNA directed against a nucleic acid coding for a tumor-associated antigen,
(vi) a host cell which expresses a tumor-associated antigen or a part thereof, and
(vii) isolated complexes between a tumor-associated antigen or a part thereof and an MHC molecule,
said tumor-associated antigen having a sequence encoded by a nucleic acid which is selected from the group consisting of:
(a) a nucleic acid which comprises a nucleic acid sequence selected from the group consisting of SEQ ID NOs: 634, 1-540, 541, 545, 549, 553, 557, 560, 563, 566, 570, 574, 577, 580, 583, 587, 591, 595, 599, 602, 606, 610, 613, 617, 620, 624, 638, 642, 646, 649, 653, 656, 660, 664, 668, 671, 675, 679, 682, and 686, a part or derivative thereof,
(b) a nucleic acid which hybridizes with the nucleic acid of (a) under stringent conditions,
(c) a nucleic acid which is degenerate with respect to the nucleic acid of (a) or (b), and
(d) a nucleic acid which is complementary to the nucleic acid of (a), (b) or (c).

5. The pharmaceutical composition as claimed in claim 3, in which the host cell additionally expresses an MHC molecule which binds to the tumor-associated antigen or the part thereof, wherein the host cell preferably is an antigen-presenting cell.

6. The pharmaceutical composition as claimed claim 2, in which the antibody is a monoclonal, chimeric, human or humanized antibody, or is a fragment of an antibody.

7. The pharmaceutical composition as claimed in claim 2, in which the antibody is coupled to a therapeutic or diagnostic agent.

8. The pharmaceutical composition as claimed in claim 1, which may be used for the treatment or prevention of cancer.

9. The pharmaceutical composition as claimed in claim 8, in which the cancer is a lung tumor, a breast tumor, a prostate tumor, a melanoma, a colon tumor, a gastric tumor, a pancreatic tumor, an ENT tumor, an ovarian tumor, a colorectal tumor, a cervical carcinoma, a colon carcinoma or a mammary carcinoma.

10. The pharmaceutical composition as claimed in claim 1, which is in the form of a vaccine and preferably is for therapeutic and/or prophylactic use.

11. A method of diagnosing or monitoring a cancer disease, which method comprises detecting or determining the quantity
(i) of a tumor-associated nucleic acid or of a part thereof, and/or
(ii) of a tumor-associated antigen or of a part thereof, and/or
(iii) of an antibody to the tumor-associated antigen or a part thereof and/or
(iv) of T lymphocytes which are specific to the tumor-associated antigen or to a part thereof
in a biological sample isolated from a patient,
said tumor-associated nucleic acid being selected from the group consisting of:
(a) a nucleic acid which comprises a nucleic acid sequence selected from the group consisting of SEQ ID NOs: 634, 1-540, 541, 545, 549, 553, 557, 560, 563, 566, 570, 574, 577, 580, 583, 587, 591, 595, 599, 602, 606, 610, 613, 617, 620, 624, 638, 642, 646, 649, 653, 656, 660, 664, 668, 671, 675, 679, 682, and 686, a part or derivative thereof,
(b) a nucleic acid which hybridizes with the nucleic acid of (a) under stringent conditions,
(c) a nucleic acid which is degenerate with respect to the nucleic acid of (a) or (b), and
(d) a nucleic acid which is complementary to the nucleic acid of (a), (b) or (c), and
said tumor-associated antigen having a sequence encoded by a nucleic acid which is selected from said group of nucleic acids.

12. The method as claimed in claim 11, in which the detection or determination of the quantity comprises
(i) contacting the biological sample with an agent which binds specifically to the tumor-associated nucleic acid or to the part thereof, to the tumor-associated antigen or the part thereof, to the antibody or to the T lymphocytes, and
(ii) detecting the formation of or determining the quantity of a complex between the agent and the nucleic acid or the part thereof, the tumor-associated antigen or the part thereof, the antibody or the T lymphocytes.

13. The method as claimed in claim 12, in which the agent which binds specifically to the tumor-associated nucleic acid or to the part thereof is an oligonucleotide or polynucleotide, which hybridizes specifically to said nucleic acid or to said part thereof.

14. The method as claimed in claim 12, in which the agent which binds specifically to the tumor-associated antigen or the part thereof is an antibody binding specifically to said tumor-associated antigen or to said part thereof.

15. The method as claimed in claim 12, in which the agent which binds specifically to the antibody is a protein or peptide binding specifically to said antibody.

16. The method as claimed in claim 12, in which the agent which binds specifically to the T lymphocytes is a cell presenting the complex between the tumor-associated antigen or the part thereof and an MHC molecule.

17. The method as claimed in claim 11 wherein said monitoring of said disease comprises determining regression, course or onset of said disease in a sample from a patient who has said disease or is suspected of falling ill with said disease.

18. The method as claimed in claim 12, in which the agent is labeled in a detectable manner.

19. The method as claimed in claim 11, in which the sample comprises body fluid and/or body tissue.

20. The method as claimed in claim 11, in which said cancer disease is characterized by expression or abnormal expression of said tumor-associated nucleic acid and preferably is further characterized by expression or abnormal expression of a tumor-associated antigen encoded by said tumor-associated nucleic acid.

21. A method of treating or preventing a disease characterized by expression or abnormal expression of a tumor-associated antigen, which method comprises administration of a pharmaceutical composition as claimed in claim 1,
said tumor-associated antigen having a sequence encoded by a nucleic acid which is selected from the group consisting of:
(a) a nucleic acid which comprises a nucleic acid sequence selected from the group consisting of SEQ ID NOs: 634, 1-540, 541, 545, 549, 553, 557, 560, 563, 566, 570, 574, 577, 580, 583, 587, 591, 595, 599, 602, 606, 610, 613, 617, 620, 624, 638, 642, 646, 649, 653, 656, 660, 664, 668, 671, 675, 679, 682, and 686, a part or derivative thereof,
(b) a nucleic acid which hybridizes with the nucleic acid of (a) under stringent conditions,
(c) a nucleic acid which is degenerate with respect to the nucleic acid of (a) or (b), and
(d) a nucleic acid which is complementary to the nucleic acid of (a), (b) or (c).

22. A method of treating, preventing, diagnosing or monitoring a disease characterized by expression or abnormal expression of a tumor-associated antigen, which method comprises administering an antibody binding to said tumor-associated antigen or to a part thereof and coupled to a therapeutic or diagnostic agent,
said tumor-associated antigen having a sequence encoded by a nucleic acid which is selected from the group consisting of:
(a) a nucleic acid which comprises a nucleic acid sequence selected from the group consisting of SEQ ID NOs: 634, 1-540, 541, 545, 549, 553, 557, 560, 563, 566, 570, 574, 577, 580, 583, 587, 591, 595, 599, 602, 606, 610, 613, 617, 620, 624, 638, 642, 646, 649, 653, 656, 660, 664, 668, 671, 675, 679, 682, and 686, a part or derivative thereof,
(b) a nucleic acid which hybridizes with the nucleic acid of (a) under stringent conditions,
(c) a nucleic acid which is degenerate with respect to the nucleic acid of (a) or (b), and
(d) a nucleic acid which is complementary to the nucleic acid of (a), (b) or (c).

23. The method as claimed in claim 22, in which the antibody is a monoclonal, chimeric, human or humanized antibody, or is a fragment of an antibody.

24. A method of treating a patient having a disease characterized by expression or abnormal expression of a tumor-associated antigen, which method comprises:
(i) providing a sample containing immunoreactive cells,
(ii) contacting said sample with a host cell expressing said tumor-associated antigen or a part thereof, under conditions which favor production of cytolytic or cytokine-releasing T cells against said tumor-associated antigen or said part thereof, and
(iii) introducing the cytolytic or cytokine-releasing T cells into the patient in an amount suitable for lysing cells expressing the tumor-associated antigen or a part thereof,
said tumor-associated antigen having a sequence encoded by a nucleic acid which is selected from the group consisting of:
(a) a nucleic acid which comprises a nucleic acid sequence selected from the group consisting of SEQ ID NOs: 634, 1-540, 541, 545, 549, 553, 557, 560, 563, 566, 570, 574, 577, 580, 583, 587, 591, 595, 599, 602, 606, 610, 613, 617, 620, 624, 638, 642, 646, 649, 653, 656, 660, 664, 668, 671, 675, 679, 682, and 686, a part or derivative thereof,
(b) a nucleic acid which hybridizes with the nucleic acid of (a) under stringent conditions,
(c) a nucleic acid which is degenerate with respect to the nucleic acid of (a) or (b), and
(d) a nucleic acid which is complementary to the nucleic acid of (a), (b) or (c).

25. The method as claimed in claim 24, in which the host cell recombinantly expresses an MHC molecule binding to the tumor-associated antigen or to a part thereof or endogenously expresses an MHC molecule binding to the tumor-associated antigen or to a part thereof.

26. A method of inhibiting the development of cancer in a patient, which method comprises administering an effective amount of a pharmaceutical composition as claimed in claim 1.

27. An agent, which binds specifically to a protein or polypeptide or to a part thereof, said protein or polypeptide being encoded by a nucleic acid selected from the group consisting of:
(a) a nucleic acid which comprises a nucleic acid sequence selected from the group consisting of SEQ ID NOs: 634, 1-540, 541, 545, 549, 553, 557, 560, 563, 566, 570, 574, 577, 580, 583, 587, 591, 595, 599, 602, 606, 610, 613, 617, 620, 624, 638, 642, 646, 649, 653, 656, 660, 664, 668, 671, 675, 679, 682, and 686, a part or derivative thereof,
(b) a nucleic acid which hybridizes with the nucleic acid of (a) under stringent conditions,
(c) a nucleic acid which is degenerate with respect to the nucleic acid of (a) or (b), and
(d) a nucleic acid which is complementary to the nucleic acid of (a), (b) or (c).

28. The agent as claimed in claim 27, which is an antibody, preferably a monoclonal, chimeric, human or humanized antibody, or a fragment of an antibody.

29. An antibody, which binds selectively to a complex of:
(i) a protein or polypeptide or a part thereof and
(ii) an MHC molecule to which said protein or polypeptide or said part thereof binds,
with said antibody not binding to (i) or (ii) alone and said protein or polypeptide being encoded by a nucleic acid selected from the group consisting of:
(a) a nucleic acid which comprises a nucleic acid sequence selected from the group consisting of SEQ ID NOs: 634, 1-540, 541, 545, 549, 553, 557, 560, 563, 566, 570, 574, 577, 580, 583, 587, 591, 595, 599, 602, 606, 610, 613, 617, 620, 624, 638, 642, 646, 649, 653, 656, 660, 664, 668, 671, 675, 679, 682, and 686, a part or derivative thereof,
(b) a nucleic acid which hybridizes with the nucleic acid of (a) under stringent conditions,
(c) a nucleic acid which is degenerate with respect to the nucleic acid of (a) or (b), and
(d) a nucleic acid which is complementary to the nucleic acid of (a), (b) or (c).

30. The antibody as claimed in claim 29, which is a monoclonal, chimeric or humanized antibody, or is a fragment of an antibody.

31. A conjugate between an agent as claimed in claim 27 and a therapeutic or diagnostic agent.

32. A kit for detecting cancer, which kit comprises agents for detecting or determining the quantity
(i) of a tumor-associated nucleic acid or of a part thereof, and/or
(ii) of a tumor-associated antigen or of a part thereof, and/or
(iii) of antibodies which bind to the tumor-associated antigen or to a part thereof, and/or
(iv) of T cells which are specific for a complex between the tumor-associated antigen or a part thereof and an MHC molecule,
said tumor-associated nucleic acid being selected from the group consisting of:
(a) a nucleic acid which comprises a nucleic acid sequence selected from the group consisting of SEQ ID NOs: 634, 1-540, 541, 545, 549, 553, 557, 560, 563, 566, 570, 574, 577, 580, 583, 587, 591, 595, 599, 602, 606, 610, 613, 617, 620, 624, 638, 642, 646, 649, 653, 656, 660, 664, 668, 671, 675, 679, 682, and 686, a part or derivative thereof,
(b) a nucleic acid which hybridizes with the nucleic acid of (a) under stringent conditions,
(c) a nucleic acid which is degenerate with respect to the nucleic acid of (a) or (b), and
(d) a nucleic acid which is complementary to the nucleic acid of (a), (b) or (c), and
said tumor-associated antigen having a sequence encoded by a nucleic acid which is selected from said group of nucleic acids.

33. The pharmaceutical composition as claimed in claim 1, in which the tumor-associated antigen comprises an amino acid sequence selected from the group consisting of SEQ ID NOs: 635, 542, 546, 550, 554, 567, 571, 584, 588, 592, 596, 603, 607, 614, 621, 625, 639, 643, 650, 657, 661, 665, 672, 676, and 683, a part or derivative thereof.

34. The agent as claimed in claim 27 in which the protein or polypeptide comprises an amino acid sequence selected from the group consisting of SEQ ID NOs: 635, 542, 546, 550, 554, 567, 571, 584, 588, 592, 596, 603, 607, 614, 621, 625, 639, 643, 650, 657, 661, 665, 672, 676, and 683, a part or derivative thereof.

35. A conjugate between an antibody as claimed in claim 29 and a therapeutic or diagnostic agent.

36. The method as claimed in claim 11, 22, or 24, in which the tumor-associated antigen comprises an amino acid sequence selected from the group consisting of SEQ ID NOs: 635, 542, 546, 550, 554, 567, 571, 584, 588, 592, 596, 603, 607, 614, 621, 625, 639, 643, 650, 657, 661, 665, 672, 676, and 683, a part or derivative thereof.

37. The kit as claimed in claim 32, in which the tumor-associated antigen comprises an amino acid sequence selected from the group consisting of SEQ ID NOs: 635, 542, 546, 550, 554, 567, 571, 584, 588, 592, 596, 603, 607, 614, 621, 625, 639, 643, 650, 657, 661, 665, 672, 676, and 683, a part or derivative thereof.

38. The antibody as claimed in claim 29, in which the protein or polypeptide comprises an amino acid sequence selected from the group consisting of SEQ ID NOs: 635, 542, 546, 550, 554, 567, 571, 584, 588, 592, 596, 603, 607, 614, 621, 625, 639, 643, 650, 657, 661, 665, 672, 676, and 683, a part or derivative thereof.

39. The conjugate as claimed in claim 31, in which the protein or polypeptide comprises an amino acid sequence selected from the group consisting of SEQ ID NOs: 635, 542, 546, 550, 554, 567, 571, 584, 588, 592, 596, 603, 607, 614, 621, 625, 639, 643, 650, 657, 661, 665, 672, 676, and 683, a part or derivative thereof.

The application's sequence listing, which the Patent Office published only in electronic form, follows.

SEQUENCE LISTING (688 sequences)

SEQ ID NO: 1 - DNA, 398 bp, Homo sapiens
  misc_feature (272)..(272): n is a, c, g, t or u
  misc_feature (274)..(274): n is a, c, g, t or u
  misc_feature (284)..(284): n is a, c, g, t or u
aacataggtggaccgctgctgagtccaggcttacttgcagagatctatgctggccaggccctgtgctaggcagcagaggacatggaataaaatcaaataaggtcactgtgtgcaggcacctcacggtgtggtaaaggagcagccccatccacaggttctattaattccagcctgtgagaattggaaccacagggtgaattttggaggacaggcacttacactaatctggaagcataatatataaagagtacctacaaatcaataaaaaaaananaaaaaaaaanagcaaagtatatgaacagaaaattcaatgaaaaggaaatagaaatggctcttaaatgaatgaaaacatactctcactcagagaaatgaaaatttaacccatgtcaagatacttg

SEQ ID NO: 2 - DNA, 99 bp, Homo sapiens
atgcacagagcatcacgtacaatggctccatggacagcccagtgcccttgtaccctaccgattgccccccttcttatgaggcagtcatgggactacgag

SEQ ID NO: 3 - DNA, 266 bp, Homo sapiens
aggagaaaacctctacttgtcctgcttcgcggaatctaacccaccggcagagtatttttggacaattaatgggaagtttcagcaatcaggacaaaagctctctatcccccaaattactacaaagcatagagggctctatacttgctctgttcgtaactcagccactggcaaggaaagctccaaatccatgacagtcgaagtctctgctccttcaggaataggacgtcttcctctccttaatccaatatagcagccgtgaagtcatt

SEQ ID NO: 4 - DNA, 492 bp, Homo sapiens
  misc_feature (369)..(369): n is a, c, g, t or u
  misc_feature (372)..(372): n is a, c, g, t or u
  misc_feature (418)..(419): n is a, c, g, t or u
  misc_feature (424)..(424): n is a, c, g, t or u
  misc_feature (443)..(443): n is a, c, g, t or u
aaaggagtcatcagcgtctctttcctggattatatctgggttacctaaagctctgtagctctgtggatcaaatcaaagttcttgttacccaaaagttgcccaacattctctgccacgtgaagatccgtgaaaacaataatatttctagagaggaatgggaatggatccaaaagctttctggctctgaatctatggaaagtgtggatcatacttctgactgccccatgcaattgttcttctacgagctccagatggcagtgaaagctctccttcagcagatcaatatacctctacaccaggcaaggaacttccgcctctacacacaggaggtgttggaaatgggtcacaatgtgtcctttcttctcctgntcnctgcctcagacgacgtctgtacagccccaggacagaataatccttnnacccnacactcagggtttcttaanctccctcttcagatgtttgaacttggtatagtagcttgtttcacctaga

SEQ ID NO: 5 - DNA, 133 bp, Homo sapiens
ttcaaaaactgctggtgagcctatggaagaggagccagccttgtgaagtgccaagtccccctctgatatttcctgtgtgtgacatcattgtgtatccccccaccccagtaccctcagacatgtcttgtctgct

SEQ ID NO: 6 - DNA, 371 bp, Homo sapiens
  misc_feature (178)..(178): n is a, c, g, t or u
ggtttcggcctctgcgaaagtgaaatgcccaagcctccggccaaagcccagaccagtacagtatgaattgtcctatgagactgaggggttcggcttcattcctacctgcccgcaaagctcgcccccagcctcgaaaacaaagcgactggtctgacgtggggtccctgcgcccctcctntagcgcgacaggacccccccagggaagagccagtacccgtgggatgtcaccccgtccccatctaccggggtggggggcctgaaaggagaacgatttaaaataatcttcagaaagaaaagggaggagggagcgggtgacacatcgttcacataaacccaatttctggtttcgagtgaagtcaagatctccgccc

SEQ ID NO: 7 - DNA, 215 bp, Homo sapiens
  misc_feature (153)..(153): n is a, c, g, t or u
ccatttaacatgtatagtaggtcaacattggtgcatccagaaaatgaagcatttaggaaatctgtttcagtgtcttttcaatgtgtgtaacttttacttgcaaaccaatggaaccaagaaagtcatcatttgcctaaaatgcagtcatcaccncaaatgattcatttatactatgtgagttaattgccttcatctcattaatggccaaggaggga

SEQ ID NO: 8 - DNA, 322 bp, Homo sapiens
actgttcagtactgcaaccccaggatacacaatggcatctggctctgtttattcaccacctactcggccactacctagaaacaccctatcaagaagtgcttttaaattcaagaagtcttcaaagtactgtagctggaaatgcactgcactgtgtgccgtaggggtctcggtgctcctggcaatactcctgtcttattttatagcaatgcatctctttggcctcaactggcagctacagcagactgaaaatgacacatttgagaatggaaaagtgaattctgataccatgccaacaaacactgtgtcattaccttctggagac

SEQ ID NO: 9 - DNA, 547 bp, Homo sapiens
ttacccttcattcacctattacggttcaggagaaaacctcgacttgtcctgcttcacggaatctaacccaccggcagagtatttttggacaattaatgggaagtttcagcaatcaggacaaaagctctttatcccccaaattactagaaatcatagcgggctctatgtttgctctgttcataactcagccactggcaaggaaatctccaaatccatgacagtcaaagtctctggtccctgccatggagacctgacagagtttcagtcatgactgcaacaactgagacactgagaaaaagaacaggctgataccttcatgaaattcaagacaaagaagaaaaaaactcaatgttattggactaaataatcaaaaggataatgttttcataattttttattggaaaatgtgctgattctttgaatgttttattctccagatttatgaactttttttcttcagcaattggtaaagtatacttttgtaaacaaaaattgaaatatttgcttttgctgtctatctgaatgccccagaattgtgaaactactc

SEQ ID NO: 10 - DNA, 396 bp, Homo sapiens
gcaggggacgcaccaaggatggagatgttccaggggctgctgctgttgctgctgctgagcatgggcgggacatgggcatccaaggagccgcttcggccacggtgccgccccatcaatgccaccctggctgtggagaaggagggctgccccgtgtgcatcaccgtcaacaccaccatctgtgccggctactgccccaccatgacccgcgtgctgcagggggtcctgccggccctgcctcaggtggtgtgcaactaccgcgatgtgcgcttcgagtccatccggctccctggctgcccgcgcggcgtgaaccccgtggtctcctacgccgtggctctcagctgtcaatgtgcactctgccgccgcagcaccactgactgcgggggtcccaaggaccac

SEQ ID NO: 11 - DNA, 311 bp, Homo sapiens
aaatggtggtgtttgactggtatatgaccttcctctggaggtgatcaaccagtaagggaaaatcgctccaagtgagcatgcacacaacctcagtaaacacactgtgcatgtggcttctcccaagtactagcaggccactgcacatgtcacaactgagcaacagcccaccccaatggagggatcaagggaggagaagaaaaaccccggaaccaaaagccagtttataaaaatcctgagccaaaggctgaggggggcacttgatctctcaagttccctacttggccctcttccaagtgtgatttgcttctttt

SEQ ID NO: 12 - DNA, 246 bp, Homo sapiens
  misc_feature (184)..(184): n is a, c, g, t or u
gccttagcccccgggatttagagcatcctcgcgaccacccggaggcttctgggggccactctgcggatgaggaagctgacgcctgggtgcagaaccccggacccccggattcagagcccaggtccagccgcgcttccgcacaaacttgcgctcggagcaagtcccctccttcccagcactcatntgagaccagaggtgtccccaccgtccccgctagcagcgctggttatattgtgggccaacctt

SEQ ID NO: 13 - DNA, 516 bp, Homo sapiens
  misc_feature (149)..(150): n is a, c, g, t or u
  misc_feature (153)..(159): n is a, c, g, t or u
  misc_feature (161)..(163): n is a, c, g, t or u
  misc_feature (165)..(165): n is a, c, g, t or u
  misc_feature (168)..(184): n is a, c, g, t or u
ccttttgcttgagcagggttcccaggagggagaaagagaagacaagagcctgatgcccaactttgtgtgtgtggggacgggggagtcagggccccccaagtcccacaatagccccaatgtttgcctatccacctcccccaagccccttnnccnnnnnnncnnntnacnnnnnnnnnnnnnnnnnctgctgctgctgctgctgctgcttaaaggctcatgcttggagtggggactggtcggtgcccagaaagtctcttctgccactgacgcccccatcagggattgggccttctttcccccttcctttctgtgtctcctgcctcatcggcctgccatgacctgcagccaagcccagccccgtggggaaggggagaaagtgggggatggctaagaaagctgggagatagggaacagaagagggtagtgggtgggctaggggggctgccttatttaaagtggttgtttatgattcttatactaatttatacaaagatattaaggccctgttcattaaga

SEQ ID NO: 14 - DNA, 162 bp, Homo sapiens
  misc_feature (92)..(92): n is a, c, g, t or u
gagcctagagagtaaggaacgttatatagttttccccaaaggttcacttgaaagaacttttcattggttgtcatggtagtaatgtcctgatnttgaaatctcccagaacctagtagctcttaaacatgctttcatcttggttcctttggtctgacggaaact

SEQ ID NO: 15 - DNA, 523 bp, Homo sapiens
  misc_feature (49)..(49): n is a, c, g, t or u
tttgcaaaaggtttccgggacactggaaatggccgaagagaaaaaaganaacagctcaccctgcagtccatgagggtgtttgatgaaagacacaaaaaggagaatgggacctctgatgagtcctccagtgaacaagcagctttcaactgcttcgcccaggcttcttctccagccgcctccactgtagggacatcgaacctcaaagatttatgtcccagcgagggtgagagcgacgccgaggccgagagcaaagaggagcatggccccgaggcctgcgacgcggccaagatctccaccaccacgtcggaggagccctgccgtgacaagggcagccccgcggtcaaggctcaccttttcgctgctgagcggccccgggacagcgggcggctggacaaagcgtcgcccgactcacgccatagccccgccaccatctcgtccagcactcgcggcctgggcgcggaggagcgcaggagcccggttcgcgagggcacagcgccggccaaggtggaagaggcgcgcgcgc

SEQ ID NO: 16 - DNA, 424 bp, Homo sapiens
actcggtcacactcagtaagtccttgcagagtccatgggtttcttcgacaagtggcttcaaggaagggaattcccacccttgtcttccagcaaggccacacacatgaaaccagcagaaaagagtcttatttgctggaaagacccccagcaagggcatagtgagcccttacagtggttccagtcagaaaaggcaccacttgggtgggcacagccccatgggtgtccaacttggtaagcagagcaaggctggacttgagtccccgtcctccacaaaacacagagccacaagccccagccctgcagcagccctccggaagcagcggggcactggtttccttgtcccctgccatctaccgagtggctcactctcaggtgggagtgctggtgatggttaattaggactgcagaaacatgagcctcctta

SEQ ID NO: 17 - DNA, 524 bp, Homo sapiens
ctatctttctggtcacattgtcggtgtttctgcatgttctccattccgctcctgatgtgcaggattgcccagaatgcacgctacaggaaaacccattcttctcccagccgggtgccccaatacttcagtgcatgggctgctgcttctctagagcatatcccactccactaaggtccaagaagacgatgttggtccaaaagaacgtcacctcagagtccacttgctgtgtagctaaatcatataacagggtcacagtaatggggggtttcaaagtggagaaccacacggcgtgccactgcagtacttgttattatcacaaatcttaaatgttttaccaagtgctgtcttgatgactgctgattttctggaatggaaaattaagttgtttagtgtttatggctttgtgagataaaactctccttttccttaccataccactttgacacgcttcaaggatatactgcagctttactgccttcctccttatcctacagtacaatcagcagtctagttcttttcatttg

SEQ ID NO: 18 - DNA, 538 bp, Homo sapiens
gtagggcgaactctgctatacagtttatgatgtcagagtgaatactttctttgagttgcagtcagaaactgtagatttttaaaaatttaaaattcattattctctgtcagtattccaaagtgtatacagaaagctattgcactgttcaggagatggcgcttaacattttggaaattcaaggtgatgaatgtccagataagactatctctcctggtacaaagtttgacaatgctgaacatttttaaaggttctttttgatatacaaagtgcaccaatgagtgctttttaattcttacaataattctgggtgaggtaggtatttttccaattcccattttatgcttcggtagccctttgtatttatacttcaaaacacttggctctcttgtaattatttaagaaattagttgtgattatttgtttaatgtgcaggagttacaaaaggcaagctttagaacaagacagacctggttatgattcctggctctgaaagctgtacaccctgtgaccctagacaggtgttttaatgcctcgctgc

SEQ ID NO: 19 - DNA, 324 bp, Homo sapiens
  misc_feature (294)..(295): n is a, c, g, t or u
tcttggtcttctgctcatggatgacgcaccagtcgtgcatgttcttggtgaagtcggccagcctgagcaagcggaggacctacgccggcctggcattccacgcctacgggaaggcaggcaagatgctggtggagaccagcatgatcgggctgatgctgggcacctgcatcgccttctacgtcgtgatcggcgacttggggtccaacttctttgcccggctgttcgggtttcaggtgggcggcaccttccgcatgttcctgctgttcgccgtgtcgctgtgcatcgtgctcccgnncagcctgcagcggaacatgatggcctcca

SEQ ID NO: 20 - DNA, 414 bp, Homo sapiens
agaaagcagagcagcctcctggaagaaggccttgtcagctttgtctgtgcctcgcaaatcagaggcaagggagaggttgttaccaggggacactgagaatgtacatttgatctgccccagccacggaagtcagagtaggatgcacagtacaaaggaggggggagtggaggcctgagagggaagtttctggagttcagatactctctgttgggaacaggacatctcaacagtctcaggttcgatcagtgggtcttttggcactttgaaccttgaccacagggaccaagaagtggcaatgaggacacctgcaggaggggctagcctgactcccagaactttaagactttctccccactgccttctgctgcagcccaagcagggagtgtccccctcccagaagcatatcccagatga

SEQ ID NO: 21 - DNA, 531 bp, Homo sapiens
caaagtcatctgaacttccgtttccccagggcctccagctgccctcagacactgatgtctgtccccaggtgctctctgcccctcatgcccctctcaccggcccagtgccccgactctccaggctttatcaaggtgctaaggcccgggtgggcagctcctcgtctcagagccctcctccggcctggtgctgcctttacaaacacctgcaggagaagggccacggaagccccaggctttagagccctcagcaggtctggggagctagagcaaaggagggacctcaggccttccgtttcttcttccagggtggggtggcctggtgttcccctagccttccaaacccaggtggcctgcccttctccccagagggaggcggcctccgcccattggtgctcatgcagactctggggctgaggtgccccggggggtgatctctggtgctcacagccgagggagccgtggctccatggccagatgacggaaacagggtctgaccaagtgccaggaagacctgtgctataaaccaccctg

SEQ ID NO: 22 - DNA, 522 bp, Homo sapiens
atgtcctgccatttggtcataagacagttgcatttactctgctaccattgcttcagttgatatgaagagagaaagctgtgttgtgatttacactggatatggaaatagagaggaacaaatctgtctgatctactttcttcaacctctgtagtagctaataatataggacagaatgctccaaagaatgaaaatgaaagtcaagattcaatggatgaaagtgagaactcctccaggtcctggaaacaaaccatttagcatcaggtcagaagctactccatggaattctgagaccacgaaagccaggtcaggtctcaaattcagtagcccaccacccacaccaccacccacaccaccctgcttcccctcatgcttgctgcctccatttccttctggaccaccaataattcccccaccacctcccacaggtctagattttcttgatgatgttaatgttttatgaagtatgctaatctcttggtacattaagtggctatcatactggctattatacagggctcaagc

SEQ ID NO: 23 - DNA, 520 bp, Homo sapiens
  misc_feature (98)..(98): n is a, c, g, t or u
  misc_feature (142)..(142): n is a, c, g, t or u
gaaaggcctgcaattgtgtcttcacgatgcttttccaagacagccaaggcaggtataattttcctcagcaagaaagaggaacctcggaggtgtgcacngcctggctggccacccaggtattggcaaaagtgactgtcgggcntgctggcccggcccccgcccgccgtccctggagcactcacgatgcggtccggcggcggcgtgctccggatgaagcacttgatctggcccttctcgccgtggagggcgtgctgggtctgggtgctggagatgatggggggtcctgttgagaaacagcgtcccattaggcacccgggaagggcacgtccctgctggcgccctcttgggtgggttcagaagtgtattcattaatccaagcattcagcaaacatttgccgaaggcctgtatgtgcaaggtaaagtgcaaggtagaggactcagagataaattaggcattcagtcataaacctctcaagggatcatgagcgaatgcttctaagtcagaacccccagaagatac

SEQ ID NO: 24 - DNA, 488 bp, Homo sapiens
agcagaacctcctagggtttctccttccactccttgccatgatcttcttctactcccgtattggttgtgtcttggtgaggctgaggcccgcaggccagggccgggctttaaaaatagctgcagccttggtggtggccttcttcgtgctatggttcccatacaatctcaccttgtttctgcatacgctgttggacctgcaagtattcgggaactgtgaggtcagccagcatctagactacgcactccaggtaacagagagcatcgccttccttcactgctgcttttcccccatcctgtatgccttctccagtcaccgcttccgccagtacctgaaggctttcctggctgccgtgcttggatggcacctggcacctggcactgcccaggcctcattatccagctgttctgagagcagcatacttactgcccttgaggaaatgactggcatgaatgaccttggagagaggcagtctgagaactaccctaac

SEQ ID NO: 25 - DNA, 552 bp, Homo sapiens
gaggagagacctgcgtgggataatcaacaggggtctggaggacggggagagctgggaatatcagatctgactgcgtgttctcacttcgcttcctggaacttgctctcattttcctgggtgcatcaaacaaaacaaaaaccaaacacccagaggtctcatctcccaggccccaggggagaaagaggagtagcatgaacgccaaggaatgtacgttgagaatcactgctccaggcctgcattactccttcagctctggggcagaggaagcccagcccaagcacggggctggcagggcgtgaggaactctcctgtggcctgctcatcacccttccgacaggagcactgcatgtcagagcactttaaaaacaggccagcctgcttgggcgctcggtctccaccccagggtcataagtggggagagagcccttcccagggcacccaggcaggtgcagggaagtgcagagcttgtggaaagcgtgtgagtgagggagacaggaacggctctgggggtgggaagtggggctaggtcttgccaactccatcttcaataaa

SEQ ID NO: 26 - DNA, 511 bp, Homo sapiens
aagcctcaaggcacttctaggacctggctcttctcaccaagatgaactcactggtttcttggcagctactgcttttcctctgtgccacccactttggggagccattagaaaaggtggcctctgtggggaattctagacccacaggccagcagctagaatccctgggcctcctggcccccggggagcagagcctgccgtgcaccgagaggaagccagctgctactgccaggctgagccgtcgggggacctcgctgtccccgccccccgagagctccgggagccgccagcagccgggcctgtccgccccccacagccgccagatccccgcaccccagggcgcggtgctggtgcagcgggagaaggacctgccgaactacaactggaactccttcggcctgcgcttcggcaagcgggaggcggcaccagggaaccacggcagaagcgctgggcggggctggggcgcaggtgcggggcagtgaacttcagaccccaaaggagtcagagcatgcgg

SEQ ID NO: 27 - DNA, 131 bp, Homo sapiens
ctcctccagcaagacagatgcctagcccgtcctcaggaatctgccgccagggagaatggcaaccctggccagatagctggaagcacagggttgctcttcaacctgcctcccggctcagttcactataagaa

SEQ ID NO: 28 - DNA, 304 bp, Homo sapiens
  misc_feature (41)..(41): n is a, c, g, t or u
  misc_feature (84)..(84): n is a, c, g, t or u
tttcctctgagagaacagcggtcttctgtctgctgtggcanagcaagtcacttcttcttgtagtgagaactgaaaccagaaccnatcatgtgccacttcctggacacctcctattaaatattaaagtcctctcaccacagaagccggagtttagtggttaggggcacaggttcttagatatgaacatcagttgcaacctaccaactgcatgctcttggacaatttacatttctgtgtatcagctttcctttttctttagaatgagatattaatagtagcaacccagaattgtcatgaagcctaa

SEQ ID NO: 29 - DNA, 226 bp, Homo sapiens
catggcaaaggcttgccccaaatctcaacttctcagacgttccatacccccacatgccaatttcagcacccaactgagatccgaggagctcctgggaagccctgggtgcaggacactggtcgagagccaaaggtccctccccagacatctggacactgggcatagatttctcaagaaggaagactcccctgcctccccagggcctctgctctcctgggagacaaag

SEQ ID NO: 30 - DNA, 567 bp, Homo sapiens
  misc_feature (195)..(195): n is a, c, g, t or u
  misc_feature (216)..(216): n is a, c, g, t or u
  misc_feature (226)..(226): n is a, c, g, t or u
  misc_feature (255)..(256): n is a, c, g, t or u
  misc_feature (261)..(261): n is a, c, g, t or u
  misc_feature (284)..(284): n is a, c, g, t or u
  misc_feature (313)..(313): n is a, c, g, t or u
  misc_feature (328)..(328): n is a, c, g, t or u
  misc_feature (333)..(334): n is a, c, g, t or u
  misc_feature (356)..(356): n is a, c, g, t or u
  misc_feature (411)..(411): n is a, c, g, t or u
  misc_feature (471)..(471): n is a, c, g, t or u
  misc_feature (473)..(473): n is a, c, g, t or u
  misc_feature (492)..(492): n is a, c, g, t or u
  misc_feature (497)..(500): n is a, c, g, t or u
  misc_feature (503)..(503): n is a, c, g, t or u
  misc_feature (510)..(511): n is a, c, g, t or u
  misc_feature (513)..(513): n is a, c, g, t or u
ggccaccagaggattctcagggctcctttgtcctggactgtggaactgggggcagctggtccctggggtctctgaagtcagtgtctccctcactgctcactgccatggtgtctctgcctctgcttctctgtgtccctcatcttcctcccacttcattctgactggcaagccctgtcctgcacagcttcttccccnacccctaggccttccccaganactccctctnactaggctggctgttctgttcccttcccnnctaanactgtggcctggcccacctcccnaggaaataggaaaggtgcagaaatcaccntggagttgccactcntgccnnggcttcatctcgagccaatgtncccaggtcactaagagaatgagcttccactgtattcccatccagggctctttccntttgtgaggctgacctgtggacaagacaatgggacagggataggcagttcctccatccantntcataattgccaggcaagntcttnnnnccncctgcannancctccccagtggatcaggggttagagatattcaagggtagtttcaggagcacag

SEQ ID NO: 31 - DNA, 448 bp, Homo sapiens
  misc_feature (82)..(82): n is a, c, g, t or u
  misc_feature (96)..(97): n is a, c, g, t or u
taatgcggacgtaccgactgccagatctttacactcacccctccacctgccccgaggagtccggtcacaagggcccagccantcacaaagacaccnnggtgtcccttccatttttttccacgaaggcccagaatccattttaggtttccaaacagacctttcgtcccttcaaggtgtaaccaccgttttccattccagccattttattggccacaccgttaccttacttataggtatttccccagaagaagactccagagaggaagctcatctgaggaaagctgagagggaagagaaacccaaacatactgaagcaaaaaaaagcctatccttcagaaaaaagcaacaaaaagatttctgttttatctttcgaaactaaaactattggatttgaagattaagtatcctaaacatcactgactagaaactgttctctttgtcagcagtg

SEQ ID NO: 32 - DNA, 396 bp, Homo sapiens
  misc_feature (141)..(141): n is a, c, g, t or u
agtgtgcatgttcactgggcatcttcccttcgacccctttgcccacgtggtgaccgctggggagctgtgagagtgtgaggggcacgttccagccgtctggactctttctctcctactgagacgcagcctataggtccgcangccagtcctcccaggaactgaaatagtgaaatatgagttggcgaggaagatcaacatataggcctaggccaagaagaagtttacagcctcctgagctgattggggctatgcttgaacccactgatgaagagcctaaagaagagaaaccacccactaaaagtcggaatcctacacctgatcagaagagagaagatgatcagggtgcagctgagattcaagtgcctgacctggaagccgatctccaggagctatgtc

SEQ ID NO: 33 - DNA, 484 bp, Homo sapiens
cggtggcttgcaacatgctcatgccagagcccgctcaacgctggctggtgggcttcgtgttgtacacatttctcatgggcttcctgctgcccgtgggggctatctgcctgtgctacgtgctcatcattgctaagatgcgcatggtggccctcaaggccggctggcagcagcgcaagcgctcggagcgcaagatcaccttaatggtgatgatggtggtgatggtgtttgtcatctgctggatgcctttctacgtggtgcagctggttaacgtgtttgctgagcaggacgacgccacggtgagtcagctgtcggtcatcctcggctatgccaacagctgcgccaaccccatcctctatggctttctctcagacaacttcaagcgctctttccaacgcatcctatgcctcagctggatggacaacgccgcggaggagccggttgactattacgccaccgcgctcaagagccgtgcctacagtgtgga

SEQ ID NO: 34 - DNA, 393 bp, Homo sapiens
tctgacttccagaacctacgataatagactccatgaaatctgtaatcagtggccacaggaaactcatgcaacagcccttccaaggggctccccagcaaagcctccgtggtgtctgcccccaacccctgtgcctcctgggacacaagacaggcccagcaagggtgggggtgccacggaaagcttggtggctgggcaggtccccagagggccgccatcagtcctcaaagacatgctcagatgcagtggctcaggcctggcaccagctggtcccaaggtggggtggtgagggtacatctgctgtgcacacgtggctggacgcgctgggggcaggtccaggtcagcttcaaggactctgcccaggctaaccctagaggcctctagtgccagcagtta

SEQ ID NO: 35 - DNA, 493 bp, Homo sapiens
aggcccatgtgctgtttttgacttcagtacttcagattgctgtgggaacacaggaggcagcagccagatgagaaattgagtctgactctggagtattataaagtccttatagttactggcattaggtatagggtctgtattattaaagagaaattattcaccaaacacttgttaaaaatggcaagacagtttatttaagagcattgcaataggtaagtgctatggtctcaatgtttgtgtctccctcaaattcataagttgaaacttcacttccaagatgaaggaattaggaggtgggcactttaagggatgattatgtcataggccagagccctcatgaacgagatcagtgcccttctaaaagaggcattgggagagacccctcaccttttccatcatatgaggacacagccaggaagcatcatccacgaaccagaaaattggcccttaccagacactgaatctgctgatgtcctgaccatggacttctgag

SEQ ID NO: 36 - DNA, 336 bp, Homo sapiens
acgctgcagcgtcacattaatctttgtgccgccagtgcctatgccatgcttagtatgcatcaaatatttgagcagtacacaagtgagtactctgagagctccccccaccaaaaatatgatgattaaatacagttatgatcagatccccagagtgtggctctaaactgtatgggggccaagtttgaatactgttgtgtcttacactgttattacctatccagtatctatttccccatattccttataaataaaacctagattttgattgggacagtaaggtgtcccactgaaaactcatttctctaaccaatgtgatgccagtgcttgcccaaaaag

SEQ ID NO: 37 - DNA, 507 bp, Homo sapiens
gtgagtgaacgtgaaggcctgcagcattactgtacactaccatagatttttatcaacactgtacacttagggacactaaacttatttaaacattttttcttcaaaaataaattaacctcagctcactgtaactttataagctttatatttaaaaaaactttttgactcttttgtagtaacacttagcttaaaacacaaacacattgtacagttacacaaaatattttcttaaaaaatattttattatatcctattctataagcttttccttgtttttcacttttttttaacttttaaactttttataaaaactaagacacaaacacacacattagtgcaggcctgcatagcatcaggatcatcagtatcactgtctcccacctccgcatcttgtcccactgaaaggtcttcagcgggaatatcatgcatggagctgtcatctcctgtgataacaatgccttcttctggatacctcctgaaggacctggttgagcctgttttacagtt

SEQ ID NO: 38 - DNA, 423 bp, Homo sapiens
gaatcccttaagcagaacaaccgtgatgccatggaactcaagcccaacggcggtgctgaccaaaaatgtctcaaagtcaacagcccaataagaatgaagaatggaaatggaaaagggtggctgcgactcaagaataatatgggagcccatgaggagaaaaaggaagactggaataatgtcactaaagctgagtcaatggggctattgtctgaggaccccaagagcagtgattcagagaacagtgtgaccaaaaacccactaaggaaaacagattcttgtgacagtggaattacaaaaagtgaccttcgtttggataaggctggggaggcccgaagtccgctagagcacagtcccatccaggctgatgccaagcaccccttttatcccatccccgagcaggccttacagaccacactgcaggaa

SEQ ID NO: 39 - DNA, 365 bp, Homo sapiens
  misc_feature (244)..(244): n is a, c, g, t or u
  misc_feature (253)..(253): n is a, c, g, t or u
ttactctgtgattaacttccttctccctcaccccaaaatacagaagagtgaaatctctgaccagaaagttcctggcacctaccttgggttctgtgaaaaaataatggccctggttttcaatgctgccaaagttaagaaaagttttcaccccttcattttaaagcagccataaagtgccatgtgtttaaccgcaggaaaaaaagggtctttttaactattgagaagtagcttttcatatccccancaggggaangaaagagcgggaaccaggagactcgtgaggactgcaaagatggtcctccctgggtacttctgctgctctcttctctccagagctactttgtgattggcctgatggtcagacc

SEQ ID NO: 40 - DNA, 389 bp, Homo sapiens
gatggagcatcatgggttggattattactgagttcaataatctggtgggttttgccagctagaaacataataaaatacatgataaaggaatagaaaggaaatatatttatttgaaattaaattactgcttataaattcatgtctctgattttacaaagtgtaatgggtaaaattaccatattctttttcttatttcaatccatacaatgagagtcatgttcagtttttcactgacttcatgctgggtaatgttcactctgcattagcggttgccatgttcaccgttttcttacaatgtctatccagtgcttgttactgtctcactgacagacagaagtctagctgttttcatccacataatggcaggcagggctagtgttgctgctgct

SEQ ID NO: 41 - DNA, 537 bp, Homo sapiens
ttatgtccctgctggtatttttgctttttcataaaaattatcatttatttttctcaactgcatattgccatcttcattttttaattttctcacatattcatagaattgttctctgtaatagatactgtacagtaattatttgttgatcgattaaccttttcaatgctacttccgacacctacttcccatcctccgtgtaacagatactgtcagttacctatccttaacagcctttccactcccaacttctgtgaatggacaagagatgcaattgtgatcactgaacatgaggcaacatcttctaggaagacatttccatagtcttcagacaaaagggagagatatcttttcagacaatctttgaacaatcctatatgaagcttacctgaagttgctgtagccgtttggcaagtctggggagactaacagacacactgaggatagcagaaaataaagatagaaacagcccaggtttttggtgaaattcatgagcttctgaataacgaaccccataccaccctacctctataaaagaat

SEQ ID NO: 42 - DNA, 351 bp, Homo sapiens
tggatcccagcatcgttggcaatagggttttaggtggagtctatctggcattcagagaagagtcaggaaaacaattgtattcccagcctgtgtccctagggcacaagcaaatcccaaattctcctcctgaaccctccaaatttgtctaagaacttcgaaaactttaacaaacaggctgatatcttcataatattcccagcctagaccaagcaggaagaacattgatttcattgaaataattgataataatgaagataatgtttttatgatttttatttgaaaatttgctaattctttaaatggtttgttttctacattgatggaatttttctcttttaatctatctacagc

SEQ ID NO: 43 - DNA, 528 bp, Homo sapiens
tctgtttatcccccaaattactacaaagcatagcgggctctatgtttgctctgttcgtaactcagccactgggcaggaaagctccacatcgttgacagtcaaagtctctgcttctacaagaataggacttcttcctctccttaatccaacatagcagctgtgatgtcatttctgtatttcaggaagactggcaggagatttatggaaaggtctcttacaaggactcttgaatacaagctcctgataacttcaagatcataccactggactaagaactttcaaaattttaatgaacaggctgataccttcatgaaattcaagacaaagaagaaaaatactcaatgttattggactaaataatcaaaaggataatgatttcataattttctatttgaaaatgtgctgattcttggaatgtttcattctccagatttatgaacattttttcttgagcaattggtaaagtatacttttgtaaacaaaaattgaaacatttccttttgctctctatctgagtgccccagaatt

SEQ ID NO: 44 - DNA, 545 bp, Homo sapiens
gggacacaccagcacagtctggtaggctacagcagcaagtctctaaagaaaggctgagaacacccagaacaggagagttcaggtccaggatggccagcctgttccggtcctatctgccagcaatctggctgctgctgagccaactccttagagaaagcctagcagcagagctgaggggatgtggtccccgatttggaaaacacttgctgtcatattgccccatgcctgagaagacattcaccaccaccccaggagggtggctgctggaatctggacgtcccaaagaaatggtgtcaacctccaacaacaaagatggacaagccttaggtacgacatcagaattcattcctaatttgtcaccagagctgaagaaaccactgtctgaagggcagccatcattgaagaaaataatactttcccgcaaaaagagaagtggacgtcacagatttgatccattctgttgtgaagtaatttgtgacgatggaacttcagttaaattatgtacatagtagagtaatcatggactggacatctcatccattctc

SEQ ID NO: 45 - DNA, 166 bp, Homo sapiens
  misc_feature (35)..(36): n is a, c, g, t or u
  misc_feature (38)..(41): n is a, c, g, t or u
  misc_feature (43)..(45): n is a, c, g, t or u
  misc_feature (57)..(57): n is a, c, g, t or u
tgctgtttgtgtgaaacctccactgtgccaagcannannnnannngactgtgaatantttaacatttattcacagatagcatgaaaagccacagtccatttgccatttagcttatttgattgagagaaaactgaggcacaggaaggcacagtgactgagcaagagt

SEQ ID NO: 46 - DNA, 205 bp, Homo sapiens
  misc_feature (28)..(28): n is a, c, g, t or u
ggatcagtcttaagaggagctttttttnggagcgagaaatcatataaaataaaatgaaataaaacaaggaggaaggcaaccagctgttaggggaaaaataaggcagataaaggagcggggagagaaattaattgccaaccaggaggagttgggctgtatttttcaaaggtggggagagtggagcacacaccttgaggaggaaagc

SEQ ID NO: 47 - DNA, 294 bp, Homo sapiens
  misc_feature (68)..(68): n is a, c, g, t or u
  misc_feature (132)..(132): n is a, c, g, t or u
  misc_feature (193)..(193): n is a, c, g, t or u
  misc_feature (207)..(207): n is a, c, g, t or u
  misc_feature (213)..(213): n is a, c, g, t or u
  misc_feature (219)..(220): n is a, c, g, t or u
  misc_feature (242)..(242): n is a, c, g, t or u
  misc_feature (260)..(260): n is a, c, g, t or u
  misc_feature (267)..(267): n is a, c, g, t or u
gaaccatttgagattcaatgcctgtgtccagctcccaggagtccaaccgtgaaatccacaagtgcagnccccaccctgtcctgcagttctctttcccttatgataatgtggttgagtcctttgtcactcccntcctcctgctggctgcagaaatgacctcagcccaggccagagaccccagctctggcaaggncctcttgtggtcgnccaggncccagnntgaaagccaagcagaatcaggncaggatctctagcgggangggaaancctgataggacctttgtcagacttttg

SEQ ID NO: 48 - DNA, 432 bp, Homo sapiens
acatttaccgtattacctagcactttcattccttgttgtctactccaaaggaaaaaaacctatgtccacacaacacatgaatgtgaatattagtagcagctttatccataatagtccataaagtagaaacacatcaaatatctatcagctgatgaaagaataaacaaatgggagtgatccatacaatttaatagaatctagcacctaaaaaaataaaatattgatacgtgctacaacacaggtgaaccacaaaagcacattaatctaagtgaaagaagacagatacaaaaaaccacatgttgtatgactctatttttatgatatccagaaaagacaaatctgtagtgtcagtaagtcaattaggggttgtctggagctggggagtgggaataaggggtggtattgatgagcatgagggatttcttaggaatt

SEQ ID NO: 49 - DNA, 541 bp, Homo sapiens
  misc_feature (54)..(54): n is a, c, g, t or u
  misc_feature (67)..(67): n is a, c, g, t or u
  misc_feature (79)..(79): n is a, c, g, t or u
  misc_feature (103)..(103): n is a, c, g, t or u
  misc_feature (127)..(127): n is a, c, g, t or u
  misc_feature (168)..(168): n is a, c, g, t or u
  misc_feature (498)..(499): n is a, c, g, t or u
gtgaatcctagagtagtttgctatcaacttctgatctttgcacattctggattnggcatataatgtnacagcagtgccnattgtaatgttgcacaaagtagtntagcaatttcttggttcaccaggnttagagataacattgtagaaatgatccagcatctttaacantctgtggtttaaggtggggcacttaggggtagaatcaataacaatgttagaaatcaaattagacaagataactgaaacagcatgatccatgtgtgactccaagttataaaggaggacatggattaatggtatacttctaggctataggggtagtacaagtggaaggacaccatcttagcatcagatcactttctgagcaactttggcaaatcttttaaattctctaatgtgtagttttttaatatatgacacaggtgtaaagaaaataaagcaagtgaatgtatgtgaaagccaatgctgactgggcacgggggctcacgcctgaaattnntagcactttgggaggcagagccggggatatcacttgagccca

SEQ ID NO: 50 - DNA, 393 bp, Homo sapiens
  misc_feature (63)..(63): n is a, c, g, t or u
  misc_feature (65)..(65): n is a, c, g, t or u
  misc_feature (67)..(69): n is a, c, g, t or u
  misc_feature (86)..(86): n is a, c, g, t or u
  misc_feature (88)..(88): n is a, c, g, t or u
  misc_feature (191)..(191): n is a, c, g, t or u
  misc_feature (285)..(285): n is a, c, g, t or u
tcatctacacgctggccagcaaggagatgcggcgggccttcttccgtctggtctgcaactgcntngnnnggggacggggggcccgngncctcacccatccagcctgcgctcgacccaagcagaagtaaatcaagcagcagcaacaatagcagccactctccgaaggtcaaggaagacctgccccacacagncccctcatcctgcatcatggacaagaacgcagcacttcagaatgggatcttctgcaactgatcgtctccatgcgccctgctctgcggctgtgtncttatttattgcatgcgtcgcttccacaggggcccctcaagagctgtgactcgggagagctaccttactttgaccaacagcctgcccagtgtggatgtctcttacaga

SEQ ID NO: 51 - DNA, 543 bp, Homo sapiens
cctccttagccttagaagccagtggtgccctgaccagaggggaccctgtgttcacaggcatcctcaaggattatcttcgagagttgcccaccccactcatcacccagcccctgtataaggtggtactggaggccatggcccgggaccccccaaacagagttccccccaccactgagggcacccgagggctcctcagctgcctgccagatgtggaaagggccacgctgacgcttctcctggaccacctgcgcctcgtctcctccttccatgcctacaaccgcatgaccccacagaacttggccgtgtgcttcgggcctgtgctgctgccggcacgccaggcgcccacaaggcctcgtgcccgcagctccggcccaggccttgccagtgcagtggacttcaagcaccacatcgaggtgctgcactacctgctgcagtcttggccaggtgagttcatgcccagggcctgcaccaccaatctgagccaggctgctacaatccccgcctgccccgacaatctccagatgtcgcgccttacttgcgacc

SEQ ID NO: 52 - DNA, 367 bp, Homo sapiens
tcgcctgtaccagctggcatatgacacctatcaggagtttaacccccagacctccctctgcttctcagagtctattccaacaccttccaacagggtgaaaacgcagcagaaatctaacctagagctgctccgcatctccctgctgctcatccagtcatggctggagcccgtgcagctcctcaggagcgtcttcgccaacagcctggtgtatggcgcctcggacagcaacgtctatcgccacctgaaggacctagaggaaggcatccaaacgctgatgtggaggctggaagatggcagcccccggactgggcagatcttcaatcagtcctacagcaagtttgacacaaaatcgcacaacgatgacgca

SEQ ID NO: 53 - DNA, 470 bp, Homo sapiens
cccccgaggacaacctggagatcgttctgcacagatgggagaacaacagctgtgttgagaagaaggtccttggagagaagactgggaatccaaagaagttcaagatcaactatacggtggcgaacgaggccacgctgctcgatactgactacgacaatttcctgtttctctgcctacaggacaccaccacccccatccagagcatgatgtgccagtacctggccagagtcctggtggaggacgatgagatcatgcagggattcatcagggctttcaggcccctgcccaggcacctatggtacttgctggacttgaaacagatggaagagccgtgccgtttctagctcacctccgcctccaggaagaccagactcccacccttccacacctccagagcagtgggacttcctcctgccctttcaaagaataaccacagctcagaagacgatgacgtggtcatctgtgtcgcc

SEQ ID NO: 54 - DNA, 504 bp, Homo sapiens
gtgtgtggattcaacagtcgaccccagctgtcgcagagcgcgaggaagctgcgcagtaaaccccttacatatcaacctctgaggaccggtttttctgcacctggtggtccttctagacgtctaggaggatcgtgttctcaggagagggttcttcagcatctgtgctgaagaacactgccccagcgggtcacatgcaagattccaccttcgagcaacatagctgacactctgcagcccagttgtcacttgtaacaaaccccagtgggtcacatagtgaggggaggcaaggcagcgtaaggcagtggctgaactatcccagaaaacaaggatcacaggcccccagtgacaccaatgttgcagaaacacctgcagtggcaagtcagatgtcctccaggaccaggcagataacaaggagtaggggtctgcagaggcctcgggagggtctgcaccatccaaagaaatcaattgttctgcacagtggtaaggatccagtgttcccagcac

SEQ ID NO: 55 - DNA, 382 bp, Homo sapiens
  misc_feature (27)..(27): n is a, c, g, t or u
  misc_feature (65)..(66): n is a, c, g, t or u
  misc_feature (70)..(70): n is a, c, g, t or u
  misc_feature (72)..(72): n is a, c, g, t or u
  misc_feature (345)..(345): n is a, c, g, t or u
gaacaccattgtcttcaataacctgtngggcatatccaggaggcacatagataggaggcacaganncatntngggacatcattggaacctgagcaggacctgtaatgcactgaaactgtccatcttctcttcttattgtaaatgcttctcctgggttaacttgtaccagaataacctgttgtgttccatctgcacttacaataggggcagacaaaagagaaatatcactacttaagatctgagttgtatccagtagtggtggatgttctgccattatcaataagacattaatatactgaataacgctccaattctccgagtcacgccgttctgaggcagaaggcngctcctctggcgcctcttcttagggttcctgatcgtt

SEQ ID NO: 56 - DNA, 440 bp, Homo sapiens
  misc_feature (83)..(83): n is a, c, g, t or u
  misc_feature (141)..(141): n is a, c, g, t or u
  misc_feature (262)..(262): n is a, c, g, t or u
  misc_feature (373)..(373): n is a, c, g, t or u
gaagtgggagcggctcagcataggatgggcacgccatcagccgtcaccaggcgcccggtggtggggtcgtaggtgcccgccangtagtagaggtcctgccggtcctggcacttgcggctccgggccatctgctcatactgntcgcgcgccacgacctggcacttgtgggagatggtctgcacgtcgttctcatcctcgtggcaggactggtacagcgcattcttgccgtcgcactgcctcttgcccagcttggtctcctcangggtggtagaaccacttgaccttgaccaccatgttgctgccccacgactcccacatgctctcgatgcggccgatgtaggggaggttgggccgcccagctgacaggaagacngcacagtccccgacacgcagggtctcctcgccccgcacgatggccttgtagaacagcttccgggcct

SEQ ID NO: 57 - DNA, 265 bp, Homo sapiens
catcgcccaccaaggcctgggtgggtgagaacagtgcccacaaggagaccctgagtaacagagactcacagcccatccaggtctctgggcaggaaattgaaggaatcatcacattttacagaggaggagactgcagctcagagtgggggaagtgtgtgcaccaggccacaggcaagtctgtccagagcactggtaggaatgagggaaactaggaatgaccactttaaaaagttagatgagaagaatttcaaggccgggcgcggtg

SEQ ID NO: 58 - DNA, 355 bp, Homo sapiens
  misc_feature (229)..(229): n is a, c, g, t or u
gctttatgcagtttgtcctttcagttttcaggaatgagacctcttgacccctcccctccaatgcagcccctactaagggggagtttaaggagccatacatagttctataattcaaatcaagtaaacatgcttcttgtcccaggttaacttgtgctgcctcagtcgctgtttaaacatttttatacgcactgttaacctgcctgcccattaccctattacttttaatggntaaactactgttccctgggcagttgtctcttttaacgtcccaccctaaacttgccaaccctcatatgaaggcctcaggcttgttattggcaaaggtcagaagtcttaagctagtgaccttgcaggc

SEQ ID NO: 59 - DNA, 443 bp, Homo sapiens
ccctgacggcagaagagcccagcttcctgcagcccctgaggcgacaggctttcctgaggagtgtgagtatgccagccgagacagcccacatctcttcaccccaccatgagctccggcggccggtgctgcaacgccagacgtccatcacacagaccatccgcagggggaccgccgactggtttggagtgagcaaggacagtgacagcacccagaaatggcagcgcaagagcatccgtcactgcagccagcgctacgggaagctgaagccccaggtcctccgggagctggacctgcccagccaggacaacgtgtcgctgaccagcaccgagacgccacccccactctacgtggggccatgccagctgggcatgcagaagatcatagaccccctggcccgtggccgtgccttccgtgtggcagatgacactgcggaaggcctgagt

SEQ ID NO: 60 - DNA, 552 bp, Homo sapiens
gtctcgaggcagggctgacacatggtgccatagccagcggagggcgctcagtgagtgccccgggccttctagacaacaggcaggaaggatgaacctcagggcacccccaggtggtgcggaaagccaggcagttgggacagaggtgcccacgagggcagaggccggtgctaaggggatggggaagaagggacaagattcccagagaggagaggaggctgttggtaggaaagtggcagggctgggggagacccagccccaagggtccggggcggaggatgctttgttcttttctggttttggttcctctttcgcggggggtgggggaggtcaacagggactgagtggggcagaggcccagaagtgccagcctggggagccgtttgggggcagccccttctgcccaccccatccttcttcctctccagagatgccaggggggcgtgtatgctctgccccttccctcagacaggggctgggtggggaggctctttaggctcaggagaagcattttaaagaaacccccaccctgccgcccgcattataaacacagga

SEQ ID NO: 61 - DNA, 361 bp, Homo sapiens
ctctttatccctcagattactccaaagcataatgggctctatgcttgctctgctcgtaactcagccactggcgaggaaagctccacatccttgacaatcagagtcattgctcctccaggattaggaactttttgctttcaataatccaagtagcagccctgatgtcatttttgtatttcaggaagactggcaggagatttatggaaaagactatgaaaaggactcttgaatacaagttcctgataacttcaagatcataccactggactaagaactttcaaaattttgatgaacaggctgataccttcatgaaattcaagacaaagaagaaaagaactccatttcattggactaaataaca

SEQ ID NO: 62 - DNA, 238 bp, Homo sapiens
  misc_feature (29)..(29): n is a, c, g, t or u
  misc_feature (33)..(33): n is a, c, g, t or u
  misc_feature (38)..(38): n is a, c, g, t or u
  misc_feature (69)..(69): n is a, c, g, t or u
  misc_feature (77)..(77): n is a, c, g, t or u
  misc_feature (91)..(91): n is a, c, g, t or u
caaagtgggaggattacaagtgttatccnaccnatgcntggacaggaatatttttaaataatgaaaccnaagttccntttcgctttgtaangttaatgcatgtattgatggtgagtagagaacaatgacacaatctctagagagacataggtgttcggcctggctcaatcactagccttatagtctcacaggaaaatatgaacttcatcaaaatagctaattattaccacatcatgga

SEQ ID NO: 63 - DNA, 355 bp, Homo sapiens
atgcagatgacgttgtggccaccgcactggccgtggagcccatgaagtttgtctacagaggcaggatcgctgtgttctctgtgaccgtgctgcacgacgaccggattgtcctggtggctgagcagcggccggatgcctcggaggaggacagcttccagtggatgagccgtgtgctgcaggtgggcgccccggcacggcctatggttcggtgaatctcccaagctggcacccccactccactccaagtgccaagtggttggcttgtcccgcccggtcctccctggctccagctttgtttatctgtatttttcattgcaaattgacaaattacagctgtatgtatttacgggataca

SEQ ID NO: 64 - DNA, 230 bp, Homo sapiens
cctccctcaaagctactaaacatgaaaacattgtgcctatatgataaaaatgtcaatattgctggtgatactgatgctgatggaaatgacgatattagctgccattaacgtagtatctaatgtgtgccaaacaatattaaaaattgctgtatatacatgtttgccatttattatttataaccttaacaagatgtctcactcataagactactttccgcactatgatacag

SEQ ID NO: 65 - DNA, 552 bp, Homo sapiens
agtggccttagacataactgctgcccaaggagccacctgtgcccttttaggaacacaatgttgtaccttatccctgacaatcagcagaacataacagcagccctgcaaaggggtcttccaggagattaaggtgactgagagcctcactgtcaaccccctgcagagatggtgagcatccctaggttctggcgtacattgggccctaatagtcataagtatcatagctgagatcctagtagtgagctgttgctctctgtattgttgttgtgggttatggactcagggctccgccatataggcatgtgtccctgcctggaggacgccctcagcctagggggtgtagtgtaagggaaatggctgtgctttagtcaggagtaggctgaggcagccttctggtgcagcatgactcagtgggtttggagtgcaagcacacaaccttgctcgttatgtaaccacaccacatgaggcccattaggtaacaactcacatgagctcgtgtttggctcagagccactattgtctgtaaaaggtataccttgctgatgctgcaca

SEQ ID NO: 66 - DNA, 508 bp, Homo sapiens
  misc_feature (48)..(48): n is a, c, g, t or u
  misc_feature (55)..(55): n is a, c, g, t or u
  misc_feature (125)..(125): n is a, c, g, t or u
  misc_feature (127)..(129): n is a, c, g, t or u
  misc_feature (132)..(137): n is a, c, g, t or u
  misc_feature (139)..(139): n is a, c, g, t or u
  misc_feature (378)..(378): n is a, c, g, t or u
  misc_feature (421)..(421): n is a, c, g, t or u
  misc_feature (474)..(474): n is a, c, g, t or u
gggtgactggtctaagtgctcaattacctgtggcaaaggaatgcagtnccgtgtnatccaatgcatgcataagatcacaggaagacatggaaatgaatgtttttcctcagaaaaacctgcagcanannngcnnnnnnancttcaaccctgcaatgagaaaattaatgtaaataccataacatcacccagactggctgctctgactttcaagtgcctgggagatcagtggccagtgtactgccgagtgatacgtgaaaagaacctatgtcaggacatgcggtggtatcagcgctgctgtgaaacatgcagggacttctatgcccaaaagctgcagcagaagagttgacctctagcaggctggctggatcacagctcttngcaattacattatttataaacacacacactagcatgtttttcnagaccaaatattatcagattacatataatttaatcaaattaatttattttttntgcctgccaaacatccaatgtggtgcttgttttg

SEQ ID NO: 67 - DNA, 410 bp, Homo sapiens
gcatgtgtaaaaagtccttcagccacaaaaccaacctgcggtctcatgagagaatccacacaggagaaaagccttatacatgtcccttttgtaagacaagctaccgccagtcatccacataccaccgccatatgaggactcatgagaaaattaccctgccaagtgttccctccacaccagaagcttcctaagctgctggtctgataatgtgtataaatatgtatgcaagtatgtatattcctatagtatttatctacttaggatataagatataatctcctgattatgctttcaatttattgtcttgcttcattaaaatgtaaggctaaggagagcatggaatttgtcagttttgttcactaaagtattccaagtggttgggaaagtggaacatttccaagaaccaataa

SEQ ID NO: 68 - DNA, 291 bp, Homo sapiens
cacaggatgtggtctctaccgtgattcctgagcatgcatgcaccccttctcctgccaatagaggggaggaagtcggaggggtgtctttatgcctataaacttgccttggaatccagcctcactccctttcctcctggagttgagaagcccccacagagactggctatgggggagtgactgtctataggttccttggatgtcctgcctatctgcaaaatgagaatgagatcgataccttcatgaggctgtaagatggcagatataaaagtgctgtgttatctcaaaagggtg

SEQ ID NO: 69 - DNA, 326 bp, Homo sapiens
  misc_feature (47)..(47): n is a, c, g, t or u
  misc_feature (58)..(58): n is a, c, g, t or u
  misc_feature (60)..(60): n is a, c, g, t or u
  misc_feature (65)..(65): n is a, c, g, t or u
  misc_feature (218)..(219): n is a, c, g, t or u
actgtgtgcagcatattgcaggctttcactcatttaatatctacaangtcctcaatangnatatnaattacttatgatttccctgttttttcttcctataaggaagctgaggcacaagttaatcaaagtctcttggcctagggtgacacagctaagatttgtacctagagatttctgagtgttgacttctctcctgcccccacctatctccccccccnnaaaaaaaaacacaacaacaacaacaacagaacataccagggattcatggcttgcccaatgttggagggggagaagagaggagagggatgagataagctcctcccacc

SEQ ID NO: 70 - DNA, 352 bp, Homo sapiens
  misc_feature (61)..(61): n is a, c, g, t or u
  misc_feature (120)..(120): n is a, c, g, t or u
  misc_feature (152)..(152): n is a, c, g, t or u
ttctgttttcttcttaaagtcatttatattatgtattactcttaaagaatgttttagtctncattttagtagtctgtgcataaggtagtaatacatgtacacaaagaaaaattcacaagncccattcaggtgtcttttagaacattatttanccactaaatatttatacagttgacataatgcttattatgcccttgaataatagaatttgttttgtttttacttcttatccataagcattggccttacattgcctcaagaggaacagaatttattattaaacaggattcttaaatccataactcatattgtgacttcatacattttgtaaccctagtagtgaatataccct

SEQ ID NO: 71 - DNA, 414 bp, Homo sapiens
gcccaaatcgcgcaggtctgggacctgattgcgggccacgaggcgcaattcggggcggagctgctgctcaggctcttcacggtgtaccccagcaccaaggtctacttcccgcacctgagcgcctgccaggacgcgacgcagctgctgagccacgggcagcgcatgctggcggctgtgggcgcggcggtgcagcacgtggacaacctgcgcgccgcgctgagcccgctggcggacctgcacgcgctcgtgctgcgcgtggacccagccaactttccgctgctaatccagtgtttccacgtcgtgctggcctcccacctgcaggacgagttcaccgtgcaaatgcaagcggcgtgggacaagttcctgactggtgtggccgtggtgctgaccgaaaaataccgctgagccctgtgc

SEQ ID NO: 72 - DNA, 533 bp, Homo sapiens
  misc_feature (51)..(51): n is a, c, g, t or u
  misc_feature (68)..(68): n is a, c, g, t or u
  misc_feature (124)..(124): n is a, c, g, t or u
  misc_feature (138)..(138): n is a, c, g, t or u
  misc_feature (208)..(208): n is a, c, g, t or u
  misc_feature (213)..(213): n is a, c, g, t or u
  misc_feature (220)..(220): n is a, c, g, t or u
  misc_feature (242)..(242): n is a, c, g, t or u
  misc_feature (251)..(251): n is a, c, g, t or u
  misc_feature (258)..(258): n is a, c, g, t or u
  misc_feature (281)..(281): n is a, c, g, t or u
  misc_feature (286)..(286): n is a, c, g, t or u
  misc_feature (357)..(357): n is a, c, g, t or u
tgccagctacaggtgctcacctgaaaagcaagccagaccatattaaccctnggcattgctggtacctnggaagactttctgattcaatgctttccacctcctcctacccctcaccacccccgtnggcatgaaatcctngggggctgctttagaaattgttttctttggctgctggtgggggtgctgctggtgggggtttgcacagctnggcanactgcanccagtctggtgggggtttgcanagctggcanactgcanccagtctcctgcctgctgccaanaaggnccatttcccaagcactggctttggagaagttggggctctgaagtgggaacacaaggctgccttttgcaggnccaggtgtaaattctccccctgccactttcagcctagcgtgaaacagatggagtgtgcattcccacttccctttatggtaccctggaatgatggagctgcccagggcatcgccacgttactctctagacagtctctttgtcttcctgcaatggcagcgccgaggttgtatatttct

SEQ ID NO: 73 - DNA, 492 bp, Homo sapiens
  misc_feature (226)..(226): n is a, c, g, t or u
  misc_feature (234)..(235): n is a, c, g, t or u
  misc_feature (253)..(253): n is a, c, g, t or u
  misc_feature (272)..(272): n is a, c, g, t or u
gaagggctgccttattttagagcacagattttctgaatatctattttgacaggttcgatcctctccccttcctgccttccttctgtcgattttcaatgtcttgatggtgtcccacctgagtggcctttagagatgtgagttgtgaggcactggggaggcaggcacacgtcctccagcccaagactgcctaatttaacagggatttctgcattctggaacaagcctnccattttnnccccaagcaggattactnccagagggcaaaacacagncccaatagtatcacatttcctttctgctttagcaaaaataaccactgtctcattcatgggaaaaggccgccaaacaaatttgttactggaaccatttgtaacaacttctagtttgcactgccttggagcaagcacactttgtagaggagggatttgcagttacttgggcaacaaggtaaccactgatcattacaggaagcttcagaaaccgtgggaccag

SEQ ID NO: 74 - DNA, 354 bp, Homo sapiens
  misc_feature (90)..(90): n is a, c, g, t or u
  misc_feature (108)..(108): n is a, c, g, t or u
  misc_feature (261)..(261): n is a, c, g, t or u
ctgttgctgctgctgagcatgggcggggcatgggcatccagggagccgcttcggccatggtgccaccccatcaatgccatcctggctgtngagaaggagggctgcccngtgtgcatcaccgtcaacaccaccatctgtgccggctactgccccaccatgatgcgcgtgctgcaggcggtcctgccgcccctgcctcaggtggtgtgcacctaccgtgatgtgcgcttcgagtccatccggctccctggctgcccgcgtggngtggaccccgtggtctccttccctgtggctctcagctgtcgctgtggaccctgccgccgcagcacctctgactgtgggggtcccaaagaccac

SEQ ID NO: 75 - DNA, 275 bp, Homo sapiens
agttccagaaatccagtgacgaatgtggtatacaaaaaaatatataaattctttcaacttagaataattaagtcataaaatacatagggtacaaataccacattccgttctaaaatgatatcttaggatcatcaaaagaaaaagaggatttggattatgcaaaaaatgattcctatatatataatcaattatctaactgacatttttgcaaatctaccacaacttcgccttttattgcatatgctaaacaagcagatgctaagtctgtaaactgt

SEQ ID NO: 76 - DNA, 62 bp, Homo sapiens
ttgcttaatcatgcgctttgttttttatgcattcacttcctgtctttatctctattttcttt

SEQ ID NO: 77 - DNA, 471 bp, Homo sapiens
ttaacctaagtatcagccctggcatgcttatactggtccaagcaagcattacgtcacagcctgttcctcttctttatctaaaagtgctttttcctttctcagcattccacaagttacttcctccttcctttgttctcctctgcctttgcctcttttaaatagttccaaggtgctggccaatcgggacaaatacagaatgtgaggtcccattccagccctggaaactggacacagcagtagggcggacgcatcaagtgataaatgaccctgtcccctttgttcgctgtactctcctggcaaaactgctggagagtgtaccctttctgcagaaagtaaaaaaaaatggccttgctgaggaaattaatgttcaagtgctatttctttatggcactggggaacaagcatttcaaacagacctgaggtttacccgatttctgctggaaaagaaacctcaggtctgctgccttagaa

SEQ ID NO: 78 - DNA, 373 bp, Homo sapiens
tctgtaggagatcttccaaattactgcttatatacatgtatattctattacaaaaattacaccactcaatgtagtctaaattattgagagtaaattgtagccattcttttacatgttttctgaacttagttgccaataatcataatcattagcttttcaaggtttgctctgaaacttacaaaccatgcaaaagtgaaaacttaggcttaacatatttggcaatttaaatcaactaaattgaatcaatctaaatactgctttgcaaagtaaaaaaggaatcaaaatgacacataagacaatcactaatccctatatttttagggtctatttcaagaaatttactactacttcttaccagcctaaggactgtgta

SEQ ID NO: 79 - DNA, 505 bp, Homo sapiens
  misc_feature (334)..(334): n is a, c, g, t or u
  misc_feature (471)..(471): n is a, c, g, t or u
aggccaggtgctatgctcagagttcacacctgcctgatactgtgaggattgggctacagattctaaaccacactctccatagaggacatggcaggtgagcggctggcttctgtgggtctgggcctggtgggttagtgtgggctgcatggccccaaggctgggagctgtgttgggatctggtggcagggggtttatctgacaacctcactattccatgtctcctctctgtgtggaggaatgggatgcagcgaggaggccaggctggagttctgtagagtgtaaaatcctggatgtcctctcagcctgtctccttgagaggacctgctgcctgccnttctggagcacgtcattctcttcttggatgaccaaataaatcattcaagaatgaaatgaaaactccttatctccttataggatctgagctcagtgatgagaagtggaaggacaataattgaccaatcacacatttanatgaataaattaggccgttggtgttcagcagcaa

SEQ ID NO: 80 - DNA, 366 bp, Homo sapiens
tgtttcctttccacttgctagaagttattttgccaatcacatatgattattttatcattttttaattaccatcagtgcatgaaattatctttattattcacttgtttttattataatcttataatttcaaataaaatgtaaatctactgtcccttgctttacctccgtgtcttcagtgcctagaacaggactgtcatacacagtgactcaatacacatttacttatgggtgattccctgcctgactgttacaggaagaaggaccaggaatatcagaatctgaagtgtcctctaaagtcataaagactagaaggcattgaataatgtttcttaactatgcaaggacttcagaattagatctcacata

SEQ ID NO: 81 - DNA, 455 bp, Homo sapiens
agatctcattttctggaggtgcatgtctcccgtgaccccctctttggattgcccgcagagcccgtgaagatggtgttatcactcctgtgattactttactgatcaggtgactttgagtcaatcaaaaggtagattatccaggtgtgcctgatttgatcaggtggtcccttaaggaggcttaaaatgaccctttctgaagtagagtaattggaaaagtaagagggtctatgggtggggtcacctggcaaggaactgaactcagcctccatgagctctggccaccagctgacctttagcaagaaagcaaatctttctttggtcagtctccacaacaggacgaagctggctgagcccttgcctttggccctgtgagatgctgacccgagtatccagcgaacacgtgccagagtcctgacccatggaaactgagatgatgagtctgtgttgctttaagc

SEQ ID NO: 82 - DNA, 119 bp, Homo sapiens
ccgattttctgtttgaagcagttcccttctatgttgcagtctccttgaaggcaaaggttgtgcactgtcatgttttgaagcccagtatcgctgagaacaatgacagacacatgcagtgg

SEQ ID NO: 83 - DNA, 137 bp, Homo sapiens
tggctctcagagaaaccgtatttgatcagagagctaaaggaagtgaggttgtgagccacagggttatcttgaagaagagcattccaaggacaggggaaacttcctcaaagaccagtaagccagagtgttcttggtgc

SEQ ID NO: 84 - DNA, 345 bp, Homo sapiens
agcttacacagcattcttagagaggacacagaatttggagtttgagtcttgccaagttatagggccttgagaaacatttagggctttccatggatccaccctaacgaagcataaaattaagcctaggattttagggtcatcagccaaaaatggaactgccttctagaacaaaaaatgacatccttttgaggaagacagtcatccagagtctttacaatcttttacccacattgcctagtacataattaaacatttctagatatgaataggaacaggaaaatgtgacccataatcaagacaacaagcaataaatggaaacctacccttaagtagctaaactgttgc

SEQ ID NO: 85 - DNA, 459 bp, Homo sapiens
tatgtttattcagggctctggaacataaaaaggctttgccacactcttcacatctataaggtttctctccagtatgaattttcttatgtttactcaggtatgcagaccatccaaaggctttgccacactcttcacatttgtaaggtttctctccagtatgaattatcttatgtttattcaggtctgtggaccatccaaaggctttgccacactcttcacatttgtggggcctctctccagtatgaattctcttatgttcattaagggttgtgaaccgactaaaggcttttccacattcttcacatgtgtagggtttctctccagtatgaatactcttatgtttattaagggttgcggattgtctaaaggctttgccacattgttcacatttgtagggcttctctccagtatgaattctcttatgttcattcagaactgaggacctactaaaggctttgc

SEQ ID NO: 86 - DNA, 229 bp, Homo sapiens
  misc_feature (78)..(78): n is a, c, g, t or u
  misc_feature (81)..(81): n is a, c, g, t or u
gggagtggacctgcattagcaagcagagaatgtccagagcctagagacagccagcccatgcagagggtagggcataanccnaggcagtggagagggtgaggagtggtgtatagaagagagcatggagtttaaggggttattatggctgagatccagaccatgagcagagaaaagttcagtttatctcacggaaaactttaatgttaggcttaatcctctgttccttcct

SEQ ID NO: 87 - DNA, 351 bp, Homo sapiens
  misc_feature (80)..(80): n is a, c, g, t or u
ggttgatggtaatttatgtaccctgacaggggtttggtttacatagctgtattcatttgtcaaaacttatattaaatggntgcaattaatattgatgcatttcattgtatgtaaattttaccctaaaataattttagacaaattgtaaaacctagttaaagacatatatgctgatattttcagggttacctctcttgatgtctgcaacttactttgaaatgcttcaaaaggaaaataggataatggatggaaatagggagagagaaatggatcgatgtgtaaataaaacaaatctatctaaatgttaaagcttaattgtagatgatgaatgtaggagtgttgaatgttaaa

SEQ ID NO: 88 - DNA, 482 bp, Homo sapiens
aagagtctatgaagaacccaacggaagtttgtggcacatccctaccctcaaattcacagtgagggtggaatgacagtaaccaaatctgtgaaaatattcacatgagacaggaaagaagtcagaatatccagtgtacaatgagagtgaaagaggatgtctaaaaggggacagcccattcacaacccacacacaacccacgcacaaatatttttgggggggcctcccatgggcatttataatcttctaagtgctccgaagaacatgtgtcacaaaagatgaagagaatattttccagaacatagcccaacaaagaacttctttgacattttttagtgtaaaggtaactgacggtatctaccaaattagcaatttgtaaaactggaatttctaaaagcaaatacttggagctgagattacctcccacttcccaaattcgagttatatgatctcaagtataataccctttggtatagacctagcca

SEQ ID NO: 89 - DNA, 37 bp, Homo sapiens
tctgagtgggcctgctctctgtagactgaattcagca

SEQ ID NO: 90 - DNA, 394 bp, Homo sapiens
  misc_feature (130)..(130): n is a, c, g, t or u
  misc_feature (135)..(135): n is a, c, g, t or u
tgcactcaatggcttctgttcgaagtccctattaaatgtttctttcttaaatactgtatttgtcagcttcttccttcagcatcccaacttcctcagactttggggtacttttgcacagacctagccaccncaaancactgtcatagatgcagcaatccactttcacaaaaccccatggacaatgcagagggggagaacagggactgattaaagaaagggacagaaatggcatcactatccaagactgaaaaacaggctgaatggattatcactctgacccaactgcacatttctaatgtcttcatgttttcaattactccatgaattcccttatctgatgctgattatgcacaggactgtgtaagagttaaacaacacctgacactggtgactc

SEQ ID NO: 91 - DNA, 300 bp, Homo sapiens
  misc_feature (175)..(175): n is a, c, g, t or u
cctcatcactatgtcaccaaagtgttttggaacttggtattccagagacttctggaacgccgtgcaaggcctgcccccagcaagccacaaccaggaaggtgcaggcacgcccccactagctcctcccctatttattgcctcctggaaaacccaggaccctcttccccatctccancccctacccctgggggcagcccagggagagccaggcacaatgagggctcccaacagctgcaaggatttatctgaacctttgagaaagaggaggagccatctaagtttctggaaacctgagcccca

SEQ ID NO: 92 - DNA, 490 bp, Homo sapiens
  misc_feature (49)..(49): n is a, c, g, t or u
  misc_feature (69)..(69): n is a, c, g, t or u
cccattgcgatctggctctgggggaccctgggatgatatccctaccccnagggacaggacccaaccccnggggacctggagagactctgtgccctgcaggaccgatgggggactcctccctgtatgtacgtgtgcgtggccctgccttgttcttgccccggacctggcctggtgaaggaggcacgaggaagattgcagtcagggacgctcagcctgggagctgaccctcaggtgaggccctaaggaagttcccagacctccctgaacctcagtatgctcatctgtccagcagcaaccctgggccttaagtgagaacatctatgcggaagaggcaggtgccaatcaagccctctgtaaagttacctccccttttcccttcttctcctctcacagagctgaagaatattttgcaaagttcattgtaaacattaaaataatcttgggtgtttatcattcgttaaacctgttgggctgactttaggtctaccgc

SEQ ID NO: 93 - DNA, 317 bp, Homo sapiens
gagaaaagtagactccccaatgcctcgcagtaaatgaggacgcctggcgcctgcggcgaggtcaactgaggtcagacgagcttatctctcctgtcccgggaattaagggcatcctggggacagctgcagagcaggaggctccccgtgccctcctcttcctaagcaagtcaggatcccaagaggcgcgtgcggggaggcccctccgaagggctgctggcttgtgtcttccaccagcgcaaagggaagctatcggttgcttctgcagtgaggcaagctcagccggacgcccagaagagagacgaggtgtcgctgtcggg

SEQ ID NO: 94 - DNA, 208 bp, Homo sapiens
  misc_feature (37)..(37): n is a, c, g, t or u
atagatattttttagtccacttggctggataataaantcttaataacagggggaaaaaaagaaagaaaaaggaggaaaagatttaggaaagaaaacaacaactttagtatggaatgtgaagaactggcaggatattcacgttgagctgtgcagtaagtagcttactggacatgtgaggctgaagatacagttgttcatatggaagcaa

SEQ ID NO: 95 - DNA, 361 bp, Homo sapiens
tccctcgtgtatcttatctttattattgaattttccctcacaatccactgttaaaagaagaaagtatcacacacgtgggttcttttggctatggaagtgtccttgagatcactttttgcacgtgactcagctgaagtgttcaaagcacatggaaatcacttgccagtgacaggtggacgttgtatgtgttttctctctcctaaggatgcctaaactttcttttcttcacaggtaaagtcagtgataaatcttttgtttgctgcatatactggagatgtgtctgcacttcgaaggtatgtttacaggatggattagcatgcactttacagatatttatgaagttgcttctgggcgagcagcc

SEQ ID NO: 96 - DNA, 377 bp, Homo sapiens
  misc_feature (32)..(32): n is a, c, g, t or u
  misc_feature (49)..(49): n is a, c, g, t or u
  misc_feature (170)..(170): n is a, c, g, t or u
  misc_feature (270)..(270): n is a, c, g, t or u
gaaacgccatggaatgtattgtatttctctantctatcccttaaaatgnccattgataattattggcaatggttattgatagtctcaacgtaatttcagtagaatttgttttgagattttttttatgcacataaaagatttctttagggattattgtacagagttctagnaaaatatataatttttttttctgggcttataactttcttttctaaaaatttatttggcagcctgattagaaatgtggtaaaatctgaacaataaaatagnaaatagactagttgcatagaatgtttcaaaaacaggcattagattggcggctactcgggaggctgaggcgggagaatcgcttgagcctgagaggtggaggttgcggt

SEQ ID NO: 97 - DNA, 525 bp, Homo sapiens
  misc_feature (72)..(72): n is a, c, g, t or u
  misc_feature (203)..(203): n is a, c, g, t or u
  misc_feature (207)..(207): n is a, c, g, t or u
cacctttctgttctgtgacgggctgtccctgcttgtcctgctttaggaggtaggtacccagtggctccccgncccctcagcggctcattcctctcgctctccccacgttggtctgtgtgagctccgctgtgtggctgccattcatccgatccatctgtggacttgctggggctgcgccgtgcacggtgtggtgaatgctacanccanccccaggggcggggctgagagtggctgggacctggagcacatggggatgctgtgtgggaaccaacttgccccccaccctgtgtctctaggggtccgcagcagtagagaagcagacagccagccctgtccctgcggcgtcaccctccaccccatactaacccagcagcgcatggagagatttcgggagtgctctaaaggcctttggagcaatttagggcaattacgggcagttttagaaatgctgaggggttgttttgcctgcggggcggggatggttgccttatgcccacagtgaagcgggcgagatgcggtagctgg

SEQ ID NO: 98 - DNA, 434 bp, Homo sapiens
  misc_feature (30)..(30): n is a, c, g, t or u
gaagttcaactcaggaaggtgcaatataancaaatgtgctatattataatgaggaatggtactaccgttccagattttctgtaattgcttctgcaaagtaataggcttcttgtcccttttttttctggcatgttatggaatgatcattgtaaatcaggaccatttatcaagcagtacaccaactcataagatcaaatttcattgaatggtttgaggttgtagctctataaatagtagtttttaacatgcctgtagtattgctaactgcaaaaacatactctttgtacaagaagtgcttctaagaatttcattgacattaatgacactgtatacaataaatgtgtagtttcttaatcgcactacctatgcaacactgtgtattaggtttatcatcctcatgtatttttatgtgacctgtatgtatattctaatct

SEQ ID NO: 99 - DNA, 412 bp, Homo sapiens
  misc_feature (47)..(47): n is a, c, g, t or u
  misc_feature (202)..(202): n is a, c, g, t or u
  misc_feature (386)..(386): n is a, c, g, t or u
gggagacagatcacaatcagatccataaggaaaagtgtgtctgtgtntatcttcctctctagggaaaaatacagcagggtgaggggattgagtgggagtgcaatcagggaagacttcctgaaggcagtgactggtgactggaatgaagcatgagaatgagccatgcaggttgcccagagagagcatccaggcagagggagcngaaagttccatcctcacccagctctgccggcccaggtactttctcctctgccttctactcccagtctcactccagtgcaacacacttcagttttctgggaactcctgatggaaagtggctgtatttgttcatccctatagccttggggcacagccagcagcccctggaggaagccccgcaggtnggtaaagagacacagggctcccagcc

SEQ ID NO: 100 - DNA, 493 bp, Homo sapiens
actgttttcagacctaaccttggcaaggtcagtcctactttgatgttcttgtttcatcacacttcttggcatttgtagatttggaagaattgggcctttggtacctctgatctcttcgtttagcaacttactgtgcacccatatgcttagcttttgctgttttagctttttttttttttttttttaacctgccacctagtggccgaaatgttgctatactattgataaggtactcctaattttggcaaaatagtaagaggcaaagcaccaaagattatgttctctcccttctccaaatctctcttggtgagaatgatctttaaaacataccactcagattattagcaatcttggtatggaacgtttttaaaaataataataatgtactttatgtggtgatttatgttattatttaggcccaaagttttgatttaattgtttccttttagcttatttttgagatatgcagtctgttaggaagctgtctctgtct

SEQ ID NO: 101 - DNA, 415 bp, Homo sapiens
gccctcttgtgtagttttcattgtgtctagtgcaatgccgtaaaccttaacaccatgagacccatatgaagtgccaacagtgatgatggaagcgctttcaaagaaagaagtcatagacattataagaataaagcgacttgcttgatatgtacagtagataggtacagctgtagctgctggccatttcagacagatgcttcatcttgtaaacagcaacataaatgtatggtaccaataaatacagtacagtactgtaaatgtgttttctcttccttatgattttcttggtacatgttcttttctctagtttactttattgttaagaatatactatataatacacatacaaaatatgtgttattgcctgtttatgttgtgggtagggcttctggtcaacagtgggctacattatcga

SEQ ID NO: 102 - DNA, 530 bp, Homo sapiens
ggactagcagtcttcttcttcagacgccatgggacccccaggcgactgctctactgccagcgttccctgctggacaaggtctgacgcccaccgccggcccgcccactcctaccacaaggactttgcctctgaagaccagtgtcagcaaggtggtggtgggtgggctgctcccatccgtccggagccccctccccgcagcctccttgcttctctcagtcccctggctggcctccttcaccctcaccgcctgtagcttgtgtctgtccagccccatctgaatgtgttgggggctctgcacttgaaggcaggaccctcagacctcgctggtaaaggtcaaatggggtcatctgctccttttccatcccctgacataccttaacctctgaactctgacctcaggaggctctgggcactccagccctgaaagccccaagtgtacccagttggcagcctcccgtcactctgactaaaaagaatcttcagagtgcatatttggaggtggaaagattgttcagttaccctaaagactt

SEQ ID NO: 103 - DNA, 509 bp, Homo sapiens
  misc_feature (47)..(48): n is a, c, g, t or u
  misc_feature (50)..(53): n is a, c, g, t or u
  misc_feature (56)..(59): n is a, c, g, t or u
  misc_feature (85)..(85): n is a, c, g, t or u
  misc_feature (112)..(112): n is a, c, g, t or u
  misc_feature (117)..(117): n is a, c, g, t or u
  misc_feature (121)..(122): n is a, c, g, t or u
  misc_feature (125)..(125): n is a, c, g, t or u
  misc_feature (179)..(179): n is a, c, g, t or u
  misc_feature (266)..(266): n is a, c, g, t or u
  misc_feature (272)..(272): n is a, c, g, t or u
  misc_feature (277)..(277): n is a, c, g, t or u
  misc_feature (285)..(285): n is a, c, g, t or u
  misc_feature (359)..(359): n is a, c, g, t or u
  misc_feature (467)..(467): n is a, c, g, t or u
taattttagctccaatccatctttctcttctccaaaaccctacctcnntnnnntcnnnnccaccccttaagtacttagtcatgcntagccttatattcttgtttgaattctnatgtnctgnnccncccaaacagattatacatttcttgggtcccatactttgcatttaccatagcagntttcatagcccatacaaacattaggccttcaaaatatttgtcaagtatttcttcaataaaaatgaaaacatcccaaatcttgatccncctaanatgtnaaatgggnacttagttaagcaaactaacatcatgatatactggaaacaggtatctctttcctttacccttgtgcctgctgangatcttattctcagccttgctgttttaaactcaggggtgtgtgtacaacatatttaagcaaattctggaataccaaagccaagcagtcttccaggggcttcatcctgncacacagcagcttacctggtgggtgttgggtagcacacagta

SEQ ID NO: 104 - DNA, 338 bp, Homo sapiens
catgatcagtgtattttagggggactaatatggcaactaaagctactttggaagagaaagagtggagatacatagattgctattatagttcaggccaatagagaggaattgggtttaagagatacattatggaggcagaagtgttcattcaacaagcgtttgttaaatatctactatgtaatcatgattatacaactagagagaatatgaaaaaaatgaattacgtatgttagcttatagatggatgctctcagtacccatccctattaatcgtcatttccctttgtttagtgaaccttctgatatattggatatcaaatatcctttccaagtattgt

SEQ ID NO: 105 - DNA, 279 bp, Homo sapiens
  misc_feature (26)..(26): n is a, c, g, t or u
  misc_feature (34)..(35): n is a, c, g, t or u
  misc_feature (41)..(41): n is a, c, g, t or u
  misc_feature (238)..(238): n is a, c, g, t or u
  misc_feature (241)..(241): n is a, c, g, t or u
gttccaggtcccggatagcgagggcngccgcgcnngctccnagggccatgaagcccccaggaggagaatcgagcaatctttttggaagtccagaagaagctactccttccagcaggcctaataggatggcatctaatatttttggaccaacagaagaacctcagaacatacccaagaggacaaatcccccaggatcatgttttcttatgtgaaggagaagaaccaaaatcggatcttnaangcttgcaaggagcatcccggctgggagcagagccaggg

SEQ ID NO: 106 - DNA, 395 bp, Homo sapiens
ccaggctactgctaagactcgtacttcccagtttggtgtgggcagctttcagactccatcctccttcagctccatgtccctccctggtgccccaactgcatcgcctggtgctgctgcctaccctagtctcaccaatcgtggatctaactttgctcctgagactggacagactgcaggacaattccagacacggacagcagagggtgtgggtgtctggccacagtggcagggccagcagcctcatcatcgttcaagttctagtgagcaacatgttcaacaaccgccagcacagcaacctggccagcctgaggtcttccaggagatgctgtccatgctgggagatcagagcaacagctacaacaatgaagaattccctgatctaactatgtttcccc

SEQ ID NO: 107 - DNA, 412 bp, Homo sapiens
acatagagaggtgactcattctttttaaaggttacattaagtttgtagtatgtcagaatggcaatactataattgttttaaccagtgacgtttaagttgtttccagattttttgatctaacaaataatgtgtcatgagtatagaatttttatgttcatgtactagtatagttataggatgactcatatttgaagcaaagtacaaaacgcatgctttctgtagctactcataaattctggtatgagcaaaatgtcaagatgcttgcttatcaccgaccaagtgatgattaagctcttgctaaactgtatcaaaggagaaaaagggaaatacaggcttatcctaacaatttcacagtgaacagtaatctctggcattcagttaaagctagacttgttctaattactttgatttt

SEQ ID NO: 108 - DNA, 531 bp, Homo sapiens
  misc_feature (121)..(121): n is a, c, g, t or u
  misc_feature (248)..(248): n is a, c, g, t or u
gtaagtggtaccagccacaactgaatatccatctgggataaaataaaattgcactcgtcttagagatccaaatcaacttcagatggattaaaactttgaatgtaaaaaacataaatgactnacagtcctgcaaaatatcttggagacaacctgtgccatctggagagtgggaagagcacatgcaaaggccaaggggtggagcagcccagcatgttctggaaaaggtagggctccccaaggctgggatnatggtggagacctgggtgtgtgggagcacaggggtgggggcccgtgggccaggaatgcacagagaggggctggtgctctgccgcaggcccaagcccccaaagcccggtcattcccagcaccatcttcacgggtttctgcccaggtctttctgctgcatctcttcctcccccgattccttaatcattttttttaaaatcagttcatgtctttgtaaaccaaattatttctaaaaggcaaatttatattactgccgaaatcaagggtcagtgagctagttgtgta

SEQ ID NO: 109 - DNA, 541 bp, Homo sapiens
  misc_feature (53)..(53): n is a, c, g, t or u
  misc_feature (98)..(98): n is a, c, g, t or u
gacttgggattccggagcagtcgcccctatcgctgctcctgcagttgcggacnccaccgaccccgccgccggaggactgggcactgaaaggcctctangcctaggcgcggcccgcggagccagacgtgttgctgccgtgagtaaaacgagcgccctctccgcactcgtttacaaattaaaatggaggaaatttcgttggccaacctggatactaacaagctagaggccatcgctcaggagatttacgtagacctgatagaggattcttgtttgggattctgctttgaggtgcaccgggcagtcaagtgtggctacttctacctggagttcgcagagactggtagcgtgaaggattttggcattcagccagtggaagacaaaggagcgtgccgcctcccgctttgctcccttcccggagaacctgggaatgggcctgatcagcagctccagcgctcacctccggaattccagtagctgcaaaatgagagtctgaaagtggccaggacaataacatagactggtcctgtggcttcgaggagta

SEQ ID NO: 110 - DNA, 359 bp, Homo sapiens
ctccctgcaaatgcacatgtcaatcaatgattaatgcacccaggttatgtacaaggcactgggcttagcaccacagggaacttccttccagaggctcgctttctagttgtgtagacaagaatacatgcatgagaagatacaagacaattcacccatgccaaatgattcatacaggctgtttaagtactgcagaaaataaaagaaggaaaggctaccagacttttcaataaggtctacagcttcccaagagcatgtctttgttaaatcaggaaatataaaaattatgtgtgtatgtgtatgtatatatatataccaccctattaactattttaaaatcgtattctattttgggggttgtg

SEQ ID NO: 111 - DNA, 491 bp, Homo sapiens
  misc_feature (56)..(56): n is a, c, g, t or u
  misc_feature (151)..(151): n is a, c, g, t or u
cagagtggactgttccctgaggtgggagatgtggaaaagccaagaggctgcagccnaggccactggcccctgagatctctgcaggaaatggctgtggagtgtggcagtttggcaaactctccaccacacgtaatgaaacttggatttgctncagtgtctggctgcagagcagtgggcctggccagcaggtccccagctttggctatgagggccttgagtcccccaaaacaccgggttccagcaccacactcagccctcattggctcttgaactgagcttggaagcttctggtgaccttccaagagcctgagagtgaggtggaattattttaaaagataaatattatattatatatatatatatttccctgaaggaaccaaagcgaattttaaaagatgcaatgtagaggggaaaagagatgatgaaaatatttaaaggccctatctgtttacagtgttccgtggttaaactcgctcactgctaagaatatt

SEQ ID NO: 112 - DNA, 287 bp, Homo sapiens
gtgatcatgagaatgctgcctttaaagatgtggccctggtcctgactgttctgctagaggaggaaacattagaagcaagtgtaggcccaagggaaacggaagaaaaagtgagagacttactctgggccaagtttaccaactctgacactcccacctccttcaaccacatggactcagacaaattgagtgggctgtggagccgaatttcacacctggtactgccagtccagccaatcttagatgctagcgttacatccacaaaaccagtgttgccttgtataactatt

SEQ ID NO: 113 - DNA, 389 bp, Homo sapiens
tagccgatcgttacctcaagggagtgggaattgggcccagctccggcccctcctggtcacctttggccatgatggccggggccatgccttgacccgacgccggagggccaagcgtagccctaagcatcactcacagcgggccaggaagaagaataagaactgccggcgccactcgctctatgtggacttcagcgatgtgggctggaatgactggattgtggccccaccaggctaccaggccttctactgccatggggactgcccctttccactggctgaccacctcaactcaaccaaccatgccattgtgcagaccctggtcaattctgtcaattccagtatccccaaagcctgttgtgtgcccactgaactgagtgccatctccatgc

SEQ ID NO: 114 - DNA, 499 bp, Homo sapiens
gtacctcgctggacctggagttagacctgcaggcgacaagaacctggcacagccaactgacccaggagatctcggtgctgaaggagctcaaggagcagctggaacaagccaagagccacggggagaaggagctgccacagtggttgcgtgaggacgagcgtttccgcctgctgctgaggatgctggagaagcggatggaccgagcggagcacaagggtgagcttcagacagacaagatgatgagggcagctgccaaggatgtgcacaggctccgaggccagagctgtaaggaacccccagaagttcagtctttcagggagaagatggcatttttcacccggcctcggatgaatatcccagctctctctgcagatgacgtctaatcgccagaaaagtatttcctttgttccactgaccaggctgtgaacattgactgtggctaaagttatttatgtggtgttatatgaaggtactgagtcacaagtcctctagtgctctt

SEQ ID NO: 115 - DNA, 504 bp, Homo sapiens
gagtttcaggaccaggcagcttgattacagcatcaagggcccctgtgttctctgttttctgcagccatagtattggcttcttcccaagacttatttttcccatcagtgtcacctgtgctacaagctccttcagtcacatctatttttgatatttgtgggtacctaggaggtgcatatatttgtgggatacatgagatactctgacacagatgtgcagtgtgcacggatcacagggaaatggggcagccatccatcccttcaagcattcatgatttctttgtgttgtgaacattcccgttgtgctctcttagttattctgaatgtacaagaaattattgctgactatagtcaccctgtcgtgctatcaaatactagacctcattcgtggtatctaactatattttgtacccattaaccatccccatctcccaccccctacctttcccactatccatcccagcctctggtaaccatccttcgtctatctccacgagttcaattgaa

SEQ ID NO: 116 - DNA, 476 bp, Homo sapiens
  misc_feature (423)..(423): n is a, c, g, t or u
agcacagtctggctggatgagacagggtcgtgcccagatgatggagaaatcgacccagaagcctgaggaggtgtcctgggtttggctggctggctcctgctccagcggcccggcttcaggtgtccgggggcgtggctgcctggagcaggtgtgctgaataccctggatgggaactgagcgaacccgggcctccgctcagagagacgtggcaggaccagcgaggaatccagcctgtccacttccagaacagtgtttcccaggccccgctgagtggaccggacctctgacacctccaggttcttgctgactccggcctggtgaaagggagcgccatggtcctggctgttggggtcccagggagaggctctcttctggacaaacacaccctcccagcccccagggctgtgcaaacacatgcccctnccataagcaccaacaagaacttcttgcaggtggagtggctgttttttataagt

SEQ ID NO: 117 - DNA, 494 bp, Homo sapiens
atccttgtacctgatgtctgagccactcagaactcaccaaaatgttcaacaccataacaacagctgctcaaactgtaaacaaggaaaacaagttgatgacttcacactgtggacagtttttcccaagatgtcagaataagactccccatcatgatgaggctctcacccctcttagctgtccttgcttgtgcctgcctctttcacttggcaggataatgcagtcattagaatttcacatgtagtataggagcttctgagggtaacaacagagtgtcagatatgtcatctcaacctcaaacttttacataacatctcaggaggaaatgtggctctctccatcttgcatacagggctcccaatagaaatgaacacagagatattgcctgtgtgtttgcagagaagatggtttctataaagagtaggaaagctgaaattatagtagagtcccctttaaatgcacattgtgtggatggctctcaccatttcctaagaga

SEQ ID NO: 118 - DNA, 553 bp, Homo sapiens
  misc_feature (191)..(191): n is a, c, g, t or u
  misc_feature (235)..(235): n is a, c, g, t or u
gataaccccaatctacgaagactagctatggaacttcctacactgagacaactccagtggaactctgataattatcctaaaataaggaggcttcttcagtagccctcgaaatatgttcaaatacatgattacatttatgtccttaatattgctattagtttctgatgttaatgtaaaagttggggaaaaangtggaaaagttaaagcagtgcaggttaattcaatgccagagtancttctcagagggtgtatattcagtgtgaacaattttcaacagagaaatgtcaacttctggccacaacggcaaccagtaaaatgactatttttactgtcttatctattaatgaagaggagattgcataatatagatgaaggagcatagtatttgcaggtggaacgcctagcagggcttgagtctcaactctgctgcttttactctaattgaccgagacaagtcatttaaactaatagagcttcaattttctcatatctaatgtaacataacaattcacagccttttactttgtagttatcgtgaagatctaatcgcagt

SEQ ID NO: 119 - DNA, 462 bp, Homo sapiens
ctcctgttcatcctgttcacagagtggctcggctgatggtagctcgaccaatggctgcaaccatgagagggctcccctgaaacttctctgtgacaatatgaagtaccagatcctctccagagccttctatggatggctggcctactgcagacacctgtccaccgtgagaacccacctatcagccctggtcaatcacatgatcgtgtctccagacttgccctgcgatgctggacagggactgacagccaggatctgggagcagtaccttcacgacagcacaagttacgaggagcaggagctgctgcgcctcatctactacgggggcatccagcctgagatccgcaaggccgtgtggcccttcctcctgggccactaccagttcgggatgacggaaacagaaaggaaagaggtggacgagcagattcatgcctgctatgcacagaccatggctgagtggctggg

SEQ ID NO: 120 - DNA, 524 bp, Homo sapiens
  misc_feature (28)..(28): n is a, c, g, t or u
  misc_feature (47)..(47): n is a, c, g, t or u
  misc_feature (56)..(56): n is a, c, g, t or u
tctgctgctgaaggcctgtgattttgtnggggaagggcctgttctangcaactggnaaaggcactgccacctgccgttggatgccaggactcaagagctggccccagtcactgtgcgcagagctgtctgagaatgtgtgagtggactgggtccttcggcactgcctgcattggctcagggcagtcaaccgtcgcagaggatgaggggcacactcaggcagcctccccggccctggaggcagaaaggcccaggcagaaccactgactgggaggaaacagaaaaagcagaggagagccaggctgcaggcgtgtggatgggaccagctcaggcagacgctgtctcatacccactctcccctctcttgccagggcctggcctggtgtctctcaggagcctgggcatgagacaaaagcagagattgttctcttgtggtaccacaggctgtaaccagtccacccagtgttgttttagaaatttaaatcggttgcccatctttttaaattggcaacatcgtttaccacatt

SEQ ID NO: 121 - DNA, 326 bp, Homo sapiens
ccccaagttggcgggcctgattgggcggcacgggccccagaacaagcagcccttcatggtggctttcttcaaggccacggaggtccacttccgcagcatccggtccacggggagcaaacagcgcagccagaaccgctccaagacgcccaagaaccaggaagccctgcggatggccaacgtggcagagaacagcagcagcgaccagaggcaggcctgtaagaagcacgagctgtatgtcagcttccgagacctgggctggcaggactggatcatcgcgcctgaaggctacgccgcctactactgtgagggggagtgtgccttccctc

SEQ ID NO: 122 - DNA, 372 bp, Homo sapiens
atgcggagtgagaaaagcctgttgcagaagactacatacaacaggatttgacacttgtaaggctccaaaacaaagaaaattaaatgatattgtttaggttttcatacataggtgataaaagtgtgtttctttgtttttaatgagaaaattagtcacagaatttaagatcttagttacttctatagggaaggcaggggaatgggacaaggaggaagcccacagcattggtcatgctctcatgttgaagttgggttcaaaggtgttcattattaaaatgcttcataatgatgaccatacatttggtatttctaggacaatcttggtttacatctattgtctcaacataattattcagtgcaagcctttcctttc

SEQ ID NO: 123 - DNA, 197 bp, Homo sapiens
ctaccttgcctgctgagacatagggctccacgggtctctctcctggggccgggctgactgtggcctgcgaggggcagtcatcgtgttgggttttcctgccagaggcagaaaccacaaaattacctggaacatacacgccccaagtgacagattcaattcaattccacaaatattgacctcgcgtctaatccactcgt

SEQ ID NO: 124 - DNA, 379 bp, Homo sapiens
ctctgagccttgcttggttgtcagaggccatgagaggtgccagttataggtggatgtgccaagatgctggtgaacttggtcttcagctatacccaggctcagaaagggcaagagccatgctgcagcgtaggtgactttggaggtgcacttggggcccagggctttgagtgttgcgggtgtgcctgtccctccagatagtgctctgtttctctctgttgtccccctgcctggtcctctggggccactgtgctttctgctgtgtgcatttataaatgatgtgtattttatatagacctgcttgcattggctgatgctcctctaattccctgagtttgattcaaccacccttgggttgttttgctatggccttagcctttga

SEQ ID NO: 125 - DNA, 495 bp, Homo sapiens
gaaccagaatccttggaagctctaggtcctacctcagaaaatctcatcgtcatggttctgcttcaagaacagaatttgggaattaggtataagttcaatgttcccatcactcgaactggcagtggagataatgaagttggctttacatggaatcatcagccttggtcagaatgctcagctacttgtgctggaggtaagatgcccactaggcagcccacccagagggcaagatggagaacaaaacacattctgagctatgctttgtgtttgttaaaaaagctaattggaaacatttcttgcaggtttgcttcaagctgtaatttagcaaaagaaactttgctttaattatattatattccatttgttttcaacctcatgtaatttgtgcagatttgttggtaaaatacatcttggcacaatgagtgtctctgctggtgcttctcccaagactatcttgaaggtgggctgtttgcctttcgtgaacacattcttggt

SEQ ID NO: 126 - DNA, 491 bp, Homo sapiens
atacctcatgcagccttcaggttcagttctgacaccagggatggaccatcccatttctctccagcctgcctccatgatgggaccccttacccagcaactgggccatctctccctcagcagcacaggcacgtatatgccgacggctgcagctatgcaaggagcttacatctcccagtacacccctgtgccttcttccagtgtttcagtcgaggagagcagcggccaacagaaccaagtggcagtggacgcaccctcagagcatggggtctattctttccagttcaacaagtaacagtgggattcccctccccatctttactgaatagaaatgaattcttggagatactcatgctcccagattccagagggttaaccaggaatggagaccatccgtcggccctgctaaggactaacacttagccatcgtttttcacaggcctgggcctggaaaaagaaatctctacgttcctgccctttactattgctgatgg

SEQ ID NO: 127 - DNA, 391 bp, Homo sapiens
ggtgctgccctgtgtacatataaatgaatctggtgttggggaaaccttcatctgaaacccacagatgtctctggggcagatccccactgtcctaccagttgccctagcccagactctgagctgctcaccggagtcattgggaaggaaaagtggagaaatggcaagtctagagtctcagaaactcccctgggggtttcacctgggccctggaggaattcagctcagcttcttcctaggtccaagccccccacaccttttccccaaccacagagaacaagagtttgttctgttctgggggacagagaaggcgcttcccaacttcatactggcaggagggtgaggaggttcactgagctccccagatctcccactgcggggagacagaagcctg

SEQ ID NO: 128 - DNA, 458 bp, Homo sapiens
tgtatggtcgctggccagtgattctccttctgagccgtgtttcccctctccctccctctccacgtgggcagggcaggccccatcgctttcctctgataaccacatggacacatcctgaagtcagcccaggcgccctgagcatcttggggcacctggaccccatcacaatactccttcttccttcaggtccctgggtgaaggctttgctgaaaccgaccccccttttcacgtcccttctgcctctgccccgttggatgccctgactgggggcaggggaagagacagggcacagctggccacagggctcagccactgagcaggctgttccgggcctttggctttgcatcctggacggggagtgtcctgtcagggaccagatgtgtcctgcctcatccctagctccaatcccttccccacgtgaccggggattctggttgcaataaaacatgctgctgctg

SEQ ID NO: 129 - DNA, 496 bp, Homo sapiens
gcagtctcgtccaatttctatagcaccgtgggcaggaacggcgtcctgccacaggctttcgaccagtttttcgagacagcctacggcaccccggaaaacctcgcctcctccgactaccccggggacaagagcgccgagaaggggcccccggcggccacggcgacctccgcggcggcggcggcggctgcaacgggcgcgccggcaacttcaagttcggacagcggcggcggcggcggctgccgggagacggcggcggcagcagaggagaaagagcggcggcggcgccccgagagcagcagcagccccgagtcgtcttccggccacactgaggacaaggccggcggctccagtggccaacgcacccgcaaaaagcgctgcccctataccaagtaccagatccgagagctggaacgggagttcttcttcagcgtctacattaacaaagagaagcgcctgcaactgtcccgcatgctcaacctcactgatcgtcaagtca

SEQ ID NO: 130 - DNA, 538 bp, Homo sapiens
  misc_feature (475)..(475): n is a, c, g, t or u
aggtcacccagctgtgaatgaacgtggtcagaacacagaatctgagttggtcacacttcccactgatccatggggcctttaagccctctggaagcttccattaaagatgattatttgaggataattgtattgggatgcctatgatcttatctagggttttcctacccatccccaacattcagctcagctgcctctttcttgaggacaccctcactgatcaccccagcccagccagagtggttgctcctgctcctgcccctgaacctatgacatacccaagtcccaatactttcgagccatctgccactgccttttgacatctctgccttggctagattcaaatggtgtttcataataaaagtctgagtttaagcagctttaccgaaaacgcaagggaagtttcattccatttatacttctccagaccccctgccatcctctgctgctacccacacaggcagaataaaaggcttanatgtgtaagtcccatgaaggcaaagattggtctcttgtgttcactgctgtctgtagtacttag

SEQ ID NO: 131 - DNA, 414 bp, Homo sapiens
gtggcaaaaggggattcggcagctgtgattaagaaccttgtgatggggagggattcctggattacccaggtgagtttaatgtaaccacaaagatcctttcaagagggaggcaggaaggtctgaggcagacgaaagagctgtgccaagggaagcaggcggcagtgggatgcaggtggcctctagaagctggaaaaggcaagtccatgggttctttcctggagccttcagaaggagcacggccttgctgacccatcttagaacggcaggataatcaatgtgtgttgtttgaggccactaagtttgtggcaatttgttacagcagcaataggaaactactacactgtgtctgattagatcaggccaatgaatggagaaagtattggatttcagttgagtgctaaaacctggtctgtt

SEQ ID NO: 132 - DNA, 408 bp, Homo sapiens
ccagcttcacatggtctctcaagtgcttatgcttttcttctctctgccacccacattcccacatcccgcccaccccccaactttcctcccttcaccttcccatggagactttttgcctgggctaaatctgatcctcagcccactctcagaatcgataaatgcccctaggtgattgtaagctcacctaagatatactttttctcctctagaattttagtttattagatttttctagttgtctttgcaaaagcgttaacaggctctgacttctgacattcaactagatgtggaatatccaacccctagcatttcatggaatgtactgaccaagataaaatgtgttcttattaaacaatgccatttcttgaccacttctgtttttaggaattgtggtatctgagtcatggt

SEQ ID NO: 133 - DNA, 483 bp, Homo sapiens
  misc_feature (94)..(94): n is a, c, g, t or u
  misc_feature (96)..(96): n is a, c, g, t or u
  misc_feature (425)..(425): n is a, c, g, t or u
gcgacaaggttgtgatccacgtggcaggtgttcagaaggctgggggcgggcagcgctggggagagccctgggtacttcgaggagaccccgaagngnggctgctcccacacctgcgccagtttccaccctctctgtgagcagggctgcggtcacctcccacatctgaagagaaccaacctgaggatttcacgctggctgcgtgccagaccagtccctgacaggttgtgcgaggcccttcgctggacagcccattgctggccactggacggagaggcagagggggctgaaattcgggcccatgcctctgtgagcgatgacggagcaacagctctccagcacgtgaagctctccagacagctgttcgtgagaagccagacagaggcctggggtctcagtccagatttctggggagtggggtgtccaancgtgggccacgctgctgggagccacctagggaagcaggtcgcctgtttctatagtgac

SEQ ID NO: 134 - DNA, 496 bp, Homo sapiens
gggaaaacccttgtacctgaagcatgagccactcagaactcaccaaaatattcgacaccataacaacagatgctcaaactgtaaaccaggacaacaagtggatgacttcacactgtggacagtttttcccaagatgtcagaacaagactccccatcatgatgaggctctcccccctcttaactgtccttgctcatgcctgcctctttcacttggcaggataatgcagtcattagaatttcacatgtagtagcttctgagagtaacaacagagtgtcagatatgtcatctcaacctcaaacttttacataacatctcagggggaaatgtggctctctccaccttgcatacagggctcccaatagaaatgaacacagagatattgcctgtgtgtttgcagagaagatggtttgtatgaagacgtaggaaagctgaaattataatagagtcccctttaaatccacattgtgtggatggctcttgccgtttcctaagaga

SEQ ID NO: 135 - DNA, 479 bp, Homo sapiens
  misc_feature (305)..(305): n is a, c, g, t or u
gagtccgaggatttcaggggcagctgggcgcaggagctggtgggctgttgggagtgcccctttactgggcaggcttccttcctcctggtgatggggggttcctcagcacaaaagtgaaggggtggaggggctggaggagcaggaatctctcttgttgataggtatgaggccttgaagtccttttctttgtcccaggattcatggacgcttcggggctgatctttgagttttcaagcatggggtgcagagacgtttaggtaaactcttaccgtcctctctcttcgtcagggcttcccaggaatcancaatgcccaagaaggaagggattgtagaaatagcttaaccctttcatttaccaacgtggaaattgaagcccagggaagggaagggaccggtcgtggaagggagagccatcagcagaaagagaccctgagatcttcgcctgggattcccaggaagtccagcccgagctgattcac

SEQ ID NO: 136 - DNA, 393 bp, Homo sapiens
  misc_feature (101)..(101): n is a, c, g, t or u
tcccaagcccttagggaccgcagaggacttggggaccagcaagcaacccccagggcacgagaagagctcttgctgtctgccctgcctcaccctgccccacnccaggcccggtggcccccagctgcatcaagtggaggcggaggaggaggcggaggagggtggcaccatgggcccgggcggtgccctccatgcccgggggatgaagacactgctgccatggacagcccgtgccagccgcagcccctaagtcaggctctccctcagttaccagggtcttcgtcagagcccttggagcctgagcctggccgggccaggatgggagtggagagttacctgccctgtcccctgctcccctcctaccactgtccaggagtgcctagtgaggcctcggca

SEQ ID NO: 137 - DNA, 377 bp, Homo sapiens
aacctatcgctgacttagcaaccaaagcctccatcgttaggcaaggaataaaataaaaccagcacgctttttccactgtgatttttaaaagtcattaaaaaatatcttttcccttatgtacagaaaaattggaacagaaaaatatctaacttgctgagcatttgatgggaaaaagtaaaagataacttccatttggtacacaacttattgtacatagagctatgatttgaggaggcatctaatttctgaacaaattcaccaagaaataccatcacttaaagtcattatcgcaatcatgctgcagtgaacactctatacaaaatggccaggtcattaaacatcaaagatggaaaacaagccagcaatctcttctgttc

SEQ ID NO: 138 - DNA, 483 bp, Homo sapiens
tgggcctcacctatgatgggatgctgagtgatgtccagagcatgcccaagactggcattctcatacttatcctaagcataatcttcatagagggctactgcacccctgaggaggtcatctgggaagcactgaatatgatggggctgtatgatgggatggagcacctcatttatggggagcccaggaagctgctcacccaagattgggtgcaggaaaactacctggagtaccggcaggtgcctggcagtgatcctgcacggtatgagtttctgtggggtccaagggctcatgctgaaattaggaagatgagtctcctgaaatttttggccaaggtaaatgggagtgatccaagatccttcccactgtggtatgaggaggctttgaaagatgaggaagagagagcccaggacagaattgccaccacagatgatactactgccatggccagtgcaagttctagcgctacaggtagcttctcctacc

SEQ ID NO: 139 - DNA, 200 bp, Homo sapiens
ttttgcttgtcttattggcccagcaaccagcttgacactggggactatcaggctccaaataataaccaatgtctcactccaaacagacaggatactacggagccagggtcagcaaacattttctgtaaagggccagatagtaaatattttgggctttgtgggccctatggtctctgtcacaacgattcaactctgctgtt

SEQ ID NO: 140 - DNA, 243 bp, Homo sapiens
gagcgcctccagtctagaaggcataagccaataggataatatattcagggtgcagggtgggtaggttgctctggggatgggtttatttaagggagattgcaaggaagctatttaacatggtgctgagctagccaggactgatggagcccctgggggtgtgggatggaggagggtctgcagccagttcattcccagggccccatcttgatgggccaagggctaaacatgcatgtgtcagtggct

SEQ ID NO: 141 - DNA, 554 bp, Homo sapiens
  misc_feature (63)..(63): n is a, c, g, t or u
  misc_feature (185)..(185): n is a, c, g, t or u
  misc_feature (187)..(187): n is a, c, g, t or u
  misc_feature (189)..(189): n is a, c, g, t or u
  misc_feature (195)..(195): n is a, c, g, t or u
  misc_feature (199)..(199): n is a, c, g, t or u
  misc_feature (204)..(204): n is a, c, g, t or u
  misc_feature (206)..(206): n is a, c, g, t or u
  misc_feature (211)..(211): n is a, c, g, t or u
  misc_feature (219)..(219): n is a, c, g, t or u
  misc_feature (223)..(223): n is a, c, g, t or u
  misc_feature (237)..(237): n is a, c, g, t or u
  misc_feature (246)..(246): n is a, c, g, t or u
  misc_feature (265)..(265): n is a, c, g, t or u
  misc_feature (269)..(269): n is a, c, g, t or u
  misc_feature (275)..(275): n is a, c, g, t or u
  misc_feature (278)..(279): n is a, c, g, t or u
  misc_feature (407)..(407): n is a, c, g, t or u
tgagtgggctttgagagagggggaagagtgagtctgagcacgagttgcagccagggccagtgnggagggggtttgggccagtgcaccttccggggccccatcccttagtttccactgcctcctgtgacgtgaggcccattcttcactctttgaagcgagcagtcagcattcttagtagtgggttncngntctgtnggangactntngagantattcttngttncctgttggagttgntcaaatgtnccttttaacggatggttgnatgngcgtcngcnnccaggtttatgaatgacagtagtcacacatagtgctgtttatatagtttaggagtaagagtcttgttttttattcagattgggaaatccattccattttgtgaattgtgacataataatagcagtggnaaaagtatttgcttaaaattgtgagcgaattagcaataacatacatgagataactcaagaaatcaaaagatagttgattcttgccttgtacctcaatctattctgtaaaattaaacaaatatgcaaaccaggatttccttgacttct

SEQ ID NO: 142 - DNA, 479 bp, Homo sapiens
ggacatggttatctacagcactgagatacactactcttctaagggcacgccatctaagtttgtgatcccagtgtcatgtgctgccccccaaaagtccccatggctcaccaagccctgctccatgagagtagccagcaagagcagggccacagcccagaaggatgagaaatgctacgaggtgttcagcttgtcacagtccagtcaaaggcccaactgcgattgtccaccttgtgtcttcagtgaagaagagcatacccaggtcccttgtcaccaagcaggggctcaggaggctcaacctctgcagccatctcactttcttgatatttctgaggattggtctcttcacacagatgatatgattgggtccatgtgatcctcaggtttggggtctcctgaagatgctatttctagaattagtatatagtgtacaaatgtctgacaaataagtgctcttgtgaccctcatgtgagcacttttga

SEQ ID NO: 143 - DNA, 514 bp, Homo sapiens
cagttgctgccctacatggagaacaggaggggtgctgtcatcctggtctcttccattgcagcttataatccagtagtggcgctgggtgtctacaatgtcagcaagacagcgctgctgggtctcactagaacactggcattggagctggcccccaaggacatccgggtaaactgcgtggttccaggaattataaaaactgacttcagcaaagtgtttcatgggaatgagtctctctggaagaacttcaaggaacatcatcagctgcagaggattggggagtcagaggactgtgcaggaatcgtgtccttcctgtgctctccagatgccagctacgtcaacggggagaacattgcggtggcaggctactccactcggctctgagaggagtgggggcggctgcgtagctgtggtcccagcccaggagcctgagggggtgtctaggtgatcatttggatctggagcagagtctgccattctgccagactagcaatttgggggcttactcatgctaggc

SEQ ID NO: 144 - DNA, 265 bp, Homo sapiens
  misc_feature (74)..(75): n is a, c, g, t or u
  misc_feature (79)..(79): n is a, c, g, t or u
  misc_feature (126)..(126): n is a, c, g, t or u
gtgtggtgtttgtgtcttaactatgcactgggcccttgtctgcgtcggcttgcatacagagggcccctggggtnngccntccggcctggcctcagccagtgggatggacagggccaggcaggcctntgaacttccacctcctggggcctcccagacctcctgtgcccccacctgtgtgggcaggtgggccagtcttcgggtgatgggaccaaaccccttcagttcagtagagaaaggctaggtcctctacaaagagctgcaagac

SEQ ID NO: 145 - DNA, 419 bp, Homo sapiens
  misc_feature (53)..(53): n is a, c, g, t or u
  misc_feature (57)..(57): n is a, c, g, t or u
  misc_feature (61)..(61): n is a, c, g, t or u
  misc_feature (73)..(73): n is a, c, g, t or u
  misc_feature (78)..(78): n is a, c, g, t or u
  misc_feature (82)..(82): n is a, c, g, t or u
  misc_feature (114)..(115): n is a, c, g, t or u
  misc_feature (130)..(130): n is a, c, g, t or u
  misc_feature (144)..(144): n is a, c, g, t or u
  misc_feature (165)..(165): n is a, c, g, t or u
  misc_feature (177)..(177): n is a, c, g, t or u
  misc_feature (189)..(190): n is a, c, g, t or u
  misc_feature (192)..(192): n is a, c, g, t or u
  misc_feature (218)..(218): n is a, c, g, t or u
  misc_feature (225)..(225): n is a, c, g, t or u
ggaggcgcagaagattgatcgcatgatggaggctttcgcttctcgctactgcntgtncaancccggggtcttncagtncacnaggtcagtgcagagcccacagcctggcccctnnccaggcacagcctcnagctctggaggggncggcccctgtgggcacagccnagcgtgtgttcntggggacctgcnntnccctgagcgaggacgacctgtgggcngggcacntcttgcaggcgggcccccagcacgcggggtcccactgtccactggaggttctggctgagcccagcaccccggactcgttgcagacacgtgctacgtgctgtcattcgccatcatcatgctcaacaccagcctccacaaccacaacgtgcgtgacaagcccacggcagaacggttcatcgccatgaaccgcggca

SEQ ID NO: 146 - DNA, 492 bp, Homo sapiens
  misc_feature (411)..(411): n is a, c, g, t or u
tatgagaaacctctgcgaccattcccagatgatgtctgcgttgtccctgagaaatttgaaggagacatcaagcaggaaggggtcggtgcatttcgagaggggccgccctaccagcgccggggtgccctgcagctgtggcaatttctggtggccttgctggatgacccaacaaatgcccatttcattgcctggacgggccggggaatggagttcaagctcattgagcctgaggaggtcgccaggctctggggcatccagaagaaccggccagccatgaattacgacaagctgagccgctcgctccgatactattatgagaaaggcatcatgcagaaggtggctggtgagcgttacgtgtacaagtttgtgtgtgagcccgaggccctcttctctttggccttcccggacaantcagcgtccagctctcaaggctgagtttgaccggcctgtcagtgaggaggacacagtccctttgtcccacttggatgagag

SEQ ID NO: 147 - DNA, 527 bp, Homo sapiens
aatattgtctcataagcatctttctatatttgttcacatcgtacataatcatgtttttgcacagatacattaatattatcatagtttgtttaactacttggctttttctaacagtttttttttttgagatggtcttgctctgttgcccaggctggagtgcagtgacgtgatctcggctcactgcagccttgacttcctgggctcaagtgatcatcccacctcagcctcctgagtagctgggactacaggtatgcaccacgaccagctaattttttgtattttttttttgtagagagggtattttgccatgttgcccaggctagtcttgaactcctgggctcaagcgatctgcctgcttcagcctcccagagtgctaggattacaggcatgagccactgcacccagcctcttaacaaattttgaatataactcctgtcttaaaatctgcagaatattgaatttttccagctattttttacttttgcttagcttatagatgctaaaggatactgtcatttgcattttta

SEQ ID NO: 148 - DNA, 476 bp, Homo sapiens
  misc_feature (50)..(50): n is a, c, g, t or u
  misc_feature (92)..(92): n is a, c, g, t or u
  misc_feature (105)..(105): n is a, c, g, t or u
ctctctcactttctatagctttgttggaccagatggtgaggaaaggaatnggcctcttcccttctagagggggctggctggagtgagacctnggggcttggcctnggaacccaccacacagccccaaagtcaggaagcctggggaaaccagagctgagacctcttcaacagggtttctttgagatcctacacctccattgggccctttttcagtcttcaatgggggcccagttggctctagaaggagaagaggtgaagcaggatcctttgccctgggggagtctgagggcgcggtccttggactcattcaggccgtctttgtagttgggggagttccactgggcgatcccagcccctccccacccaccctctaatggacctcctcatagaagccccatttcacttttgttttatctacctcttagcaaaacaatagataaattaggtagtggcagctccacttgcttaggttaggg

SEQ ID NO: 149 - DNA, 177 bp, Homo sapiens
gggagtttgaccagagatgcaaggggtgaaggagcgcttcctaccgttagggaactctggggacagagcgccccggccgcctgatggccgaggcagggtgcgacccaggacccaggacggcgtcgggaaccataccatggcccggatccccaagaccctaaagttcgtcgtcgtcat

SEQ ID NO: 150 - DNA, 497 bp, Homo sapiens
  misc_feature (109)..(109): n is a, c, g, t or u
  misc_feature (113)..(113): n is a, c, g, t or u
  misc_feature (146)..(147): n is a, c, g, t or u
ctaaccactgaggctctctaatcttcctctggagttttagtgaaaggatttattgagcagcttctggaatataatgtgcatgtccaaaatgaactcagcgcttcaaaangacnaagtctgtagcctggaggggcttgagtggatgnnagctgatgctgtgattttgagctgtggttacatgcagtcagtaaacctgtgagactgctggaggaaatgtagcagacagcatggaggctgggacccagcagctactttgggtcatgtctttactgtcctgcctccaaccctttagtctcgtagacttttgttcttgtggaaatttcttctgtattccagttgtgtaaatatgtatggaaaactgatattactaggttttacgttgcatctccagtattgatctttggaaactgatgttacattaggttccaattcgcaatagtagcagagactgacatgcttttattgagctgctaagccccgtggatgatggagcgaga

SEQ ID NO: 151 - DNA, 529 bp, Homo sapiens
  misc_feature (195)..(195): n is a, c, g, t or u
  misc_feature (393)..(393): n is a, c, g, t or u
  misc_feature (403)..(403): n is a, c, g, t or u
  misc_feature (417)..(417): n is a, c, g, t or u
  misc_feature (431)..(433): n is a, c, g, t or u
  misc_feature (435)..(435): n is a, c, g, t or u
  misc_feature (440)..(440): n is a, c, g, t or u
  misc_feature (442)..(443): n is a, c, g, t or u
gccgacagctcctttaatttcatggcgtttttcttcatcttcggagcccagtttgtcctgaccgtcatccaggcgattggcttctccggctggggcgcgtgcggctggctgtcggcaattggattcttccagtacagcccgggcgctgccgtggtcatgctgcttccagccatcatgttctccgtgtcggctgcnatgatggccatcgcgatcatgaaggtgcacaggatctaccgaggggctggcggaagcttccagaaggcacagacggagtggaacacgggcacttggcggaacccaccgtcgagggaggcccagtacaacaacttctcaggcaacagcctgcccgagtaccccactgtgcccagctacccgggcagtggccagtggccnttagagggangcctgccctgcccncaccgcccaccacnnncnccccntnnttcctgctgctacccctgtgtcccgagggctgggagtacctggggccccatccccccagctgtgatggtggaagccggtggtggcc

SEQ ID NO: 152 - DNA, 437 bp, Homo sapiens
  misc_feature (145)..(146): n is a, c, g, t or u
agatgaagcccttcaagcgctacgtgaagaagaaagccaagcccaagaaatgtgcccggcgtttcaccgactactgtgacctgaacaaagacaaggtcatttcactgcctgagctgaagggctgcctgggtgttagcaaagaagnngacgcctcgtctaaggagcagaaaacccaagggcaggtggagagtccagggaggcaggatggatcaccagacacctaaccttcagcgttgcccatggccctgccacatcccgtgtaacataagtggtgcccaccatgtttgcacttttaataactcttacttgcgtgttttgtttttggtttcattttaaaacaccaatatctaataccacagtgggaaaaggaaagggaagaaagactttattctctctcttattgtaagtttttggatctgctactgacaacttttaga

SEQ ID NO: 153 - DNA, 87 bp, Homo sapiens
ttctttcacaccctgtcgggagaatgtgtgccctgcgactgtaatggcaattccaacgagtgtttggacggctcaggatactgtgtg

SEQ ID NO: 154 - DNA, 417 bp, Homo sapiens
cccgctggtgcagtggaagagcccggcggccgccgccgcagccttctcggcccgcgcccccgccgcctgcacccccatctgctcttccccgcgggggccgcgcggcgcgggctgggggcccgggcagccgcgctcgggcagcgggggcgcggggctgccgcctgcgctcgcagctggtgccggtgcgcgcgctcggcctgggccaccgctccgacgagctggtgcgtttccgcttctgcagcggctcctgccgccgcgcgcgctctccacacgacctcagcctggccagcctactgggcgccggggccctgcgaccgcccccgggctcccggcccgtcagccagccctgctgccgacccacgcgctacgaagcggtctccttcatggacgtcaacagcacctggagaaccgtggacc

SEQ ID NO: 155 - DNA, 407 bp, Homo sapiens
taagagactgagccgctagcagcgcctggggaccagacagacgcatgtggcaaagctcaccatcttcactacaaacacgcctgagagtggcactggggaaacataactccatctacaccttggatttggactgattctccattttatcacctgaaggcttgggccagagctcaacagctactcaactggaggggtgagggggataaggtctgtagtatacagacaggaagatggtaggtttatgccttctgtggccagagtcttggactcatggaaatagaatgaatagaggggcattcacaaggcacaccagtgcaagcagatgacaaaaaggtgcagaaggcaatcttaaaacagaaaggtgcaggaggtaccttaactcacccctcagcaaatacctatgtcaa

SEQ ID NO: 156 - DNA, 399 bp, Homo sapiens
gagaccagttcacggggcaagagatgaacgtggcccagttcctcatgcacatgggcttcgacatgcagacggtggcccagccgcagggactggagcccagtgagctgctggggatgctgagcaacggaagctaggcagactgtctggaggaggagccggcactgaggggcccagacacccgctgccccagtgccacctcaccccccaccagcaggccctcccgtctcttcgggacagggccccagccgtcccccctgtctgggtctgcccactgccctcctgccccggctttccctgcccctctcccacagcccagccagagacaagggacctgctgtcatccccatctgtggcctgggggtccttcctgacaacgagggggtagccagaagagaagca

SEQ ID NO: 157 - DNA, 422 bp, Homo sapiens
gtgaccagtaccgcaaggggatcatctcgggctccgtctgccaggacctgtgtgagctgcatatggtggagtggaggacctgcctctcggtggccccgggccagcaggtgtacagcgggctctggcgggacaaggatgtaaccatcaagtgtggcattgaggagaccctcgactccaaggcccggtcggatgcggccccccggcgggagctggtactgtttgacaagcccacccggggcacctccatcaaggaattccgggagatgaccctcggcttcctcaaggcgaacctgggagacctgccttccctgccggcgctggttggccaggtcctgctcatggctgacttcaacaaggacaaccgggtgtccctggcggaagccaagtccgtgtgggccctgctgcagcgtaacgagttcctg

SEQ ID NO: 158 - DNA, 414 bp, Homo sapiens
  misc_feature (364)..(364): n is a, c, g, t or u
  misc_feature (373)..(373): n is a, c, g, t or u
  misc_feature (375)..(376): n is a, c, g, t or u
  misc_feature (378)..(380): n is a, c, g, t or u
  misc_feature (383)..(384): n is a, c, g, t or u
acgcagcccgcgacaacaaaaagacccgcatcatcccgcgccacttgcagctggccatccgcaacgacgaggagctcaacaagctgcttggtaaagttaccatcgctcagggcggtgttctgcctaacatccaggccgtactgctccccaagaagactgagagccaccacaaagctaagggcaagtaagggctgaactttaaaaatgtaaacttacaagacaaaaggctcttttcagagccacccaccatttctacggaagaactgagcactctgttctccaaacctatcagaaatttgtggccgagttcaagcactgaggccattactttcctattgggtaaaataaaagtattgaatcaggnctagtaaanannannnaanngctaccttataacatgaaggaacctcctta

SEQ ID NO: 159 - DNA, 470 bp, Homo sapiens
tatcaagattgcccctgcggaaggcccagacgtcagcgaaaggatggtcatcatcaccgggccaccggaagcccagttcaaggcccagggacggatctttgggaaactgaaagaggaaaacttctttaaccccaaagaagaagtgaagctggaagcgcatatcagagtgccctcttccacagctggccgggtgattggcaaaggtggcaagaccgtgaacgaactgcagaacttaaccagtgcagaagtcatcgtgcctcgtgaccaaacgccagatgaaaatgaggaagtgatcgtcagaattatcgggcacttctttgctagccagactgcacagcgcaagatcagggaaattgtacaacaggtgaagcagcaggagcagaaataccctcagggagtcgcctcacagcgcagcaagtgaggctcccacaggcaccagcaaaacaacggatgaatgtagcccttccaac

SEQ ID NO: 160 - DNA, 383 bp, Homo sapiens
agagagactcagagacccgggagggccttcctctgaaaggccaagccaagccatgcttggcagggtgaggggccagttgagttctgggagctgggcactactctgccagtccagagttgtacagcagaagcctctctcctagactgaaaatgaatgtgaaactaggaaataaaatgtgcccctcccagtctgggaggaggatgttgcagagccctctcccatagtttattatgttgcatcgtttattattattattgataatattattattactatttttttgtgtcatgtgagtcctctctccttttctctttctgacattccaaaaccaggccccttcctacctctggggctgcttgagtctagaacccttcgtatgtgtg

SEQ ID NO: 161 - DNA, 474 bp, Homo sapiens
aggatgcccctttgagaaatgctgttccacagaaccctgcctttcaggccttggagacgtgggcaggggagaagcagcgtccctcagagccaggcctggcagtggtgctagcaggggccaaggccagggagcagggtctcctgtcggagggacctgggcaagcccctccacgcgccagcgggtttctcagcaggggaggtccacaccacaccgcttgggaacctgggtgcctaaacgcaacaggagccaaggcacaaatttaaccaaacaccaaggttgcgtgaggccccatttcatgagccgggctccaaggacgtgtccttaggcggctctggaaggcccagcgccagcccccgtcctctgttaaagggagccagccccggcgtccgcccaggcatggtagcctgagcgcgcccccagggtagtagggggcacctgaggagcagggtctgccctggcatgagcagagcccag

SEQ ID NO: 162 - DNA, 371 bp, Homo sapiens
  misc_feature (134)..(134): n is a, c, g, t or u
gatacttggatgcttttcctctgactgatgaagatcctgaataccaaagagggccgctgacaggtctaggagtacacttctagcacctagcagagagaggcttcactacatcatgcttcctgacatctctcccnttgaagagcagtcagactcctgctttgctcttcagacttaatttgggggtttaacaggtgaggttgctgggggaactcttttacaacatctctctgaaagaatccgggctgccagtttcatttggtttgggtgtcagtagcatgatggaaagacaaaaaaacacaacttgacatctgcagaaatgggttcaaattttacctgcaactcaccaattctgtggccttggttcagcaatt

SEQ ID NO: 163 - DNA, 445 bp, Homo sapiens
caacaagacggacctggctgataagaggcagataaccatcgaggagggggagcagcgcgccaaagaactgagcgtcatgttcattgagaccagtgcgaagactggctacaacgtgaagcagctttttcgacgtgtggcgtcggctctacccggaatggagaatgtccaggagaaaagcaaagaagggatgattgacatcaagctggacaaaccccaggagcccccggccagcgagggcggctgctcctgctaatgcagagccgacctgtggcttcccatgacactccttgcttgttgtgttgcttcctattggctagcttcctaaggggggagggaaccgagttatcaagatgggaggatttttcttttctctctgtctttaggagtagggtgggatggggagggaggctgggcatcagggatcacatcactcttaacggctgtt

SEQ ID NO: 164 - DNA, 313 bp, Homo sapiens
ggtggcctctggatcctccgtggaccgaaccgtccccccaggaacacaccttcaggtagaccccgaagcctcaaggccggggctggagcggagaccccagggcctctcaggagacagtgaggctgcccctcctaccacctacctcattctgcctactcaccccaggggccacagccacagcctgctggactcaggactgtcctgtcaactccagacaactgaataaacaggccgggtacagtggctcgcacctgtaatcctagcactttgggaggccgaagcgggtggaccacttgacgtccgtagttcgaga

SEQ ID NO: 165 - DNA, 344 bp, Homo sapiens
aatgtcatgtttattcaggctgggaactgtattcacagtagaagtttcagtggtcaacatatctatgactctttaggctgctgtagttttacagtcaattatttaaaagtgagtagttacatttataagagcctgagaatacttagactcagtcatttgttagtatttttaccaaaatctcttagtttcagacatgtcagaagcagctatatagcatatcttattctatgatatacatcaggctatctcaagttcctgtctcacagttaattcaaagaaggattaggatttctgtattttttctcatttgaatctttatgtgcatttggtttgtgtacatgctt

SEQ ID NO: 166 - DNA, 448 bp, Homo sapiens
tcttaccccactgaaaccaacagggatcgggccaggctcccagattcttgaggacagggacttcggcatttactaatgggggactactgtggggtaagggggcgcctgcttgcctgatacaggatggggtcaagggacagtgggcaggtcctcactcaggagtggggggtgtaggctggccagcccccagggcttgtccaccagtcttctccccgcaaggccctcagagcagcgcctgtgggtgtcagtattacctgagcctaggccaaagctagcccaaggctggggaaggggaggagactccaggtcagaatgtgaggtctcagtctgtgatttaaggtgttgcatgtggactcttaactgtacgtgtagtttctagtggagaaatcaaggctctgatcattttgtttttagtatgaaaatgtgatttcctttctgtttgtaactc

SEQ ID NO: 167 - DNA, 334 bp, Homo sapiens
agatgccagtaatcaatattgaggacctgacagaaaaggacaaattgaagatggaagttgaccagctcaagaaagaagtgacactggaaagaatgctagtttccaaatgttgtgaagaagtaagagattacgttgaagaacgatctggcgaggatccactggtaaagggcatcccagaggacaaaaatcccttcaaggagctcaaaggaggctgtgtgatttcataatacaaacaaaaagaaaaaaaattaaacaaattcttggaaatatctcaaatgttaataacaatatgaatttttctcatgcatactattactactaagcatgtacgtga

SEQ ID NO: 168 - DNA, 561 bp, Homo sapiens
gcccccgactgaggcggagacgaaggtgctgcaggcgcgacgggagcggcaagatcgcatctcccggctcatgggcgactatctgctgcgcggttaccgcatgctgggcgagacgtgtgcggactgcgggacgatcctcctccaagacaaacagcggaaaatctactgcgtggcttgtcaggaactcgactcagacgtggataaagataatcccgctctgaatgcccaggctgccctctcccaagctcgggagcaccagctggcctcagcctcagagctccccctgggctctcgacctgcgccccagcccccagtacctcgtccggagcactgtgagggagctgcagcaggactcaaggcagcccaggggccacctgctcctgctgtgcctccaaatacagatgtcatggcctgcacacagacagccctcttgcagaagctgacctgggcctctgctgaactgggctccagcacctccctggagactagcatccagctgtgtggccttatccgcgcatgtgcggaggccctgcgcagcctgcagcagctacagcactaaga

SEQ ID NO: 169 - DNA, 244 bp, Homo sapiens
  misc_feature (94)..(94): n is a, c, g, t or u
  misc_feature (128)..(128): n is a, c, g, t or u
aatgtgtatgtctgggtaagtgtatagattttacaactattttgaaggcgacctttttaactttaaacagaccactctggaggagacgcctganccagagcgctttacctaaagttcggtgcctaaantgcacccttcctctggctggtgtctcccttctgccaagctatgcctcctgcagaggtaggctccgtggtgtctcccactccgccccaactggagaacggtgtaaagaactgtcagc

SEQ ID NO: 170 - DNA, 408 bp, Homo sapiens
  misc_feature (262)..(262): n is a, c, g, t or u
  misc_feature (268)..(268): n is a, c, g, t or u
caggatggcattagctctgtgtctgcaggtgctgtgcagcctgtgtggctggctctcgctctatatttctttctgccacctgaataagcaccgaagctatgagtggagctgccgcctggtcaccttcacccatggagtcctctctataggcctctccgcttatattggcttcattgatggcccatggccttttacccacccaggctcacccaatacacctctccaagttcatgtcctgtgtctcaccttgggctacttcatnttcgancttgggctgcatctggcgctttgcatggaggaagagcatcaagaagtaccatgcttggagaagcaggcggagtgaggaacggcagctgaaacacaacggacatctcaaaatacactagccaaggcttgctccagattatg

SEQ ID NO: 171 - DNA, 359 bp, Homo sapiens
aggacatcgaggctgcggtgaaccatgattgtaccactgtattccagcctggacgactgagtgagaccctgtctcaaacaaaacaaaacaaaacaaaaaaaagtacaagaggaaaaaaattgatttctgattgcctcactcaagataaggtcaacattgaaggtggaggtggaagatgcagtttatgtaggggtctgaagattttaccattctggggactgtctttaagaaagagaatccaaaattaggtagaaaagtgaacgtctgaccgggcgcggtggctcatccctgtaatcccagcacttaaggagtacgagacgggaggatcacgaggtcaagagatcgacagcatgctggcc

SEQ ID NO: 172 - DNA, 386 bp, Homo sapiens
  misc_feature (182)..(182): n is a, c, g, t or u
gtttctgcctttgaacgtggctgtgggaagacatgatgcttagtgttgctgcagctatctcatgaccttgggcaaaacatcccaacacacaggagggccaaacaagcagtcagaagaagcctgagtcttgtgggtgttgttgagcagctgaacaaaccctaggatggcttccttccagactncttaggattgcgaacaatgaagctctattgtttaagcaaggtatcgatggctattttcacttgccactgaaagcaccaggacagagaatcgtctttctaggaatacagccacaaaagccttcattatggtatatgcacataaagaatataaaagtttcctttatgtttctctttaaaatatagctgaagtctgcctcaggcaaa

SEQ ID NO: 173 - DNA, 408 bp, Homo sapiens
ggttccaggctttgcatctggagcctttaccggttgactgttgccttccacacaaacagcctctgaaaagcactttctccatacataattctggagaagatgagggatcttgccctccaggagccttccttcctcccccaatgaggaaatcagtcactgcactggtgcaaaggcaagcagattggaatttctgctcttcaccgattttctcagggaaagaccccttccccttgccagcagaggaacctgtagttttttccatttctttcttcagaaccaaagtatgtatcactcctcatgctcacagggattgacaggagagaattcaccaggatcttagctcaaaagacacagcctcagaatggccagatggattgcacgaaacctgacttggattcaccatcttcc

SEQ ID NO: 174 - DNA, 331 bp, Homo sapiens
  misc_feature (227)..(227): n is a, c, g, t or u
  misc_feature (229)..(229): n is a, c, g, t or u
  misc_feature (264)..(264): n is a, c, g, t or u
gtggacgagtgactgtccctggtttgggctggtgccatttagagggcaaccagagtgcagggaagggaggagcttgggcaagagggacattgctgtcgctggttgatggtgagatggcacttaatgagaacctggtcattgggaaagccccaagcctgcgtcttgctgtgatgccttccccattatgaagggtccattggcatgggagtggggagacctggactcananaagctacaagggcaagggtggaaaggcatagcttntgcaagttgatgctgaaaaagatccaagactcatattcagcagacagcccataaccaagagccaagg

SEQ ID NO: 175 - DNA, 260 bp, Homo sapiens
aggtcttcaaagaattggccagtcttacagctcaccttggggtgtagatgactctccactgtggtgctaggcaattttattgaacaggtggccactggtggtgatggctgaaccactcattaaacaaattgctctaaatggcctcagtatcaaggtgtgctttctgtacccttaatctgactttaatcctgcagaacctcagtcttaccatgtttaacagcattgccatgtacgatatgcctttatcctacactgtatat

SEQ ID NO: 176 - DNA, 528 bp, Homo sapiens
gctggctatgtacatggtcccattccctacctgcacttctttatgcctgtcttcaccctgctgaccatccacagcagccagcactaccaggccctcatagtgcctgagctcacccagcagatggttgatgccaagaacatgatggttccctgagacccctgccatggccactacctaaaggtggccacagtgttcacggactacatgtccatgaaggagttggatgagcaaatgcttaatgtccaaaacaagaacagcagctactttgttgagtgaatccccaactatgtgaaaacagctgtctgtgacatcccactcttggggctataaatgtctgccaccttcaacatcaacagcgtggccatccaggagctgttcaagcacatctctgagtggtcatgtttcggtgcaaagcctttctgcactggcacatgggcaagagcatggactagatggagttcaccaaggctgagagcaacatgaacaacctggtgtcccggtaccagtaataccaggacacctcagcca

SEQ ID NO: 177 - DNA, 540 bp, Homo sapiens
  misc_feature (31)..(31): n is a, c, g, t or u
  misc_feature (34)..(34): n is a, c, g, t or u
  misc_feature (48)..(49): n is a, c, g, t or u
  misc_feature (52)..(52): n is a, c, g, t or u
  misc_feature (54)..(54): n is a, c, g, t or u
  misc_feature (64)..(64): n is a, c, g, t or u
  misc_feature (66)..(66): n is a, c, g, t or u
  misc_feature (76)..(76): n is a, c, g, t or u
  misc_feature (78)..(78): n is a, c, g, t or u
  misc_feature (122)..(122): n is a, c, g, t or u
acttatctgtgctgtaactattgaaatgaanccncttcaaatatgtannccncntttctttttnanatttctagananggtttcaatatagactttctgacttttatggtatacatataggncaatattctattcttctttccttttaaatacttactgtttcaatttcaaataaaaaatcagcattctagtttgtacattttagcacagaaatgtttacaaccttcagcacaattgcttttgtaatttactgacttggcattttgaggcgtttttaacaaattatgagaaataacaccttcagaaagcatgtgactactttgatgcaactatttacaatgtattcataagaagtcattaacctgtagagttcttagacatgtggaacctttaacaattatactaaagagtacatacaaaatacagagctatgtaataataactaattttaaatcctgacaaattagaagttaagcctactatctgtaaaaatatgtcctgattcatttttttaagtatatacctgagcctttaaaaagt

SEQ ID NO: 178 - DNA, 560 bp, Homo sapiens
  misc_feature (460)..(460): n is a, c, g, t or u
  misc_feature (462)..(466): n is a, c, g, t or u
  misc_feature (468)..(469): n is a, c, g, t or u
  misc_feature (471)..(472): n is a, c, g, t or u
  misc_feature (475)..(481): n is a, c, g, t or u
  misc_feature (483)..(487): n is a, c, g, t or u
  misc_feature (489)..(493): n is a, c, g, t or u
  misc_feature (496)..(503): n is a, c, g, t or u
  misc_feature (505)..(510): n is a, c, g, t or u
  misc_feature (512)..(535): n is a, c, g, t or u
gccattttgagtgccagatctagttattttgctgcaatgctgagtggctgttgggctgaaagctcccaagagtacgttactcttcaaggtataagccatgtagaactgaatgttatgatgcattttatatatggaggaactctggacattccagacaaaactaatgttggtcagatactcaatatggctgatatgtatggactagaaggattaaaagaagtagcaatctatattttaagaagagattactgtaatttctttcagaagcctgttcccagaacattgacgtctatactagaatgcctgattattgctcattcagttggagtggaaagtctttttgctgactgcatgaagtggattgtaaagcattttgcaaggttttggtctgagagaagctttgcaaatatacctcctgagattcagaaaagttgtcttaatatgttgattcagtccttantnnnnntnncnngannnnnnntnnnnntnnnnnccnnnnnnnngnnnnnncnnnnnnnnnnnnnnnnnnnnnnnncagggtgcactcacagcacagaaca

SEQ ID NO: 179 - DNA, 385 bp, Homo sapiens
gggttcacgtcattttcctgtctcagcctccccagtagctgggactccaggcacccaccaccactcccggctaattttttgtatttttagtacagacagggtttcactgtgttggccaggatggtcttgatctcctgaccttgtgatccacccacctcggcctcccaaagtgctgggattgcaggcatgaatgaccgcgcccagccgcaggcgcaacttttttgagttttcctggccaggcgcggtggctcaggcctgtagtcccagcattttgggaggccgaggtgggcggatcacttgaggtcaggagttagaaaccagcctggccaacgtggtgaaaccccgtctccagtaaacatacaaagccattacagggcatggtggg

SEQ ID NO: 180 - DNA, 173 bp, Homo sapiens
gacaaccttagttcacttgggtattcccataatccttgtctttcagggttgacctgttacagctgcttaaacacatcactgtatgctaggtattgcctaccttcacttacttttctaaccttgccgatgtgctgccttcataaactgggtatatctccgccacacttctacgt

SEQ ID NO: 181 - DNA, 340 bp, Homo sapiens
  misc_feature (167)..(167): n is a, c, g, t or u
ggtaactttggccaagacttttcagtaggaaatgcttcaaaatacaaagcaagagctattttcaagaaagaccttctaaatttatattaggacatagtgagaagaaagccatctgaaaaccaggaagagagccctcaccagaatctgaccatgctggtgccctgatncttggactttcagcctccagaactgcaaaattctggtgtggtgtgaatgctgtggctcagtccgaacatgtttttttctgtaattttatcattattacacgattgcaatatcagttttgttttttaattggaaagcaacattttctactgttgaaagacgttttttgacaaat

SEQ ID NO: 182 - DNA, 416 bp, Homo sapiens
acagcttgtctgtcacagtgcctgttctgattgcaggctttggtgttctcctggtgttaatcctgacttttttcctagtgatccaccctctgggaaacttctggctaattcttagcgtcacctcaattgagctgggcgttctgggcttaatgacattatggaacgtcgacatggattgcatttctatcttgtgccttatctacaccttgaatttcgccattgaccactgtgcaccactgcttttcacatttgtattagcaactgagcacacccgaacacaatgtataaaaagctccttgcaagaccatgggacagccattttgcaaaatgttacttcttttcttattgggttagtcccccttctatttgtgccttcgaacctgaccttcacactgttcaaatgcttgctgctcact

SEQ ID NO: 183 - DNA, 503 bp, Homo sapiens
  misc_feature (78)..(78): n is a, c, g, t or u
  misc_feature (84)..(84): n is a, c, g, t or u
  misc_feature (210)..(210): n is a, c, g, t or u
  misc_feature (247)..(247): n is a, c, g, t or u
  misc_feature (371)..(371): n is a, c, g, t or u
aggccgggctcagaggcggagaagcctgcctggtgcccacagccgtctggctcagggactccaccctggccccgagtngccgtntgctgggcctttccttcctggctctgcaccccatgctggctgcccggtctggcttcccttcttgtctctgtcttgggcgaggcagctgtgagcattgcacagaggcaaagaccctcctgcagcctntgcgctgggccgtagaaacaagagcctttgtaatacngaacctcattcaaggattaggagtggtggttaggtcagggccacccccagtgctgcaggaacggcctccacccagctctgttggtcagagcctgggtcatgcacctggagttgggagatcaagntgggtctcagggcagtgaggtggccatatccaccacatcgcatttcgtgggggaagaggtgacctctttgttttaaacttaaggtgtctgcttatccagccagaaataaaaatctgccagtggtgttcccaa

SEQ ID NO: 184 - DNA, 377 bp, Homo sapiens
  misc_feature (26)..(26): n is a, c, g, t or u
  misc_feature (294)..(294): n is a, c, g, t or u
gagtcccgtctcagtgtggaggaacnggctgcacatgggacctgaaggtgccctctgtgtttatgttgggggtgggggggcagtgctggctgcctctgtcctgtgtgtgaccctaccctcgaagggtcctgtcctgtcagtcccgagggagccacaaccaaagctgcggagagaaggtggggaagggtgcggaatggccgtggggcacagcgtggcagactgttcagtctctgctgggtctttcctagggacctggaaggccagtgttgcttccccctcactccctttcactgnaggcagcctctctgcttccccaatgccttatgcctgggcacactgccacagaatatgcaatatgtgtgggtgaccatgccctc

SEQ ID NO: 185 - DNA, 390 bp, Homo sapiens
gtcatcctgtgctcagttagcagctcatccagctgggtcaggaaagccttttggaagcgtaggaccttgccagccagcgctgggatatgcaggaggacggggacagcattcagcacctcgcgcagaaagcccgactcctccttcagtccctcctgagctaggtccagcagcctgaggaagcgagggtcgtcgtactcgaagcggcgcccgcaggtgagggaggcgatcacgttgctcacggctttgtccaagagaccgttggggcgaaaggggcgtcggagtggttggcgaaggcggcacaaaggcaggcggcctcctcggtcacccactgctccagcgacttcttgcccaggcccaagttgcgcaaggtggagacggagaagcgcctct

SEQ ID NO: 186 - DNA, 188 bp, Homo sapiens
ggctggcaacccagaaagattggatttcagtgccatggtgctggctgcggagagcttcacctcagggaggcactactgggaggtggacgtggaaaaggcaaccaggtggcaagtgggcatataccacggctctgcagacgcgaagggcagcacggccagagcttccggagagaaagtcttgctcacgg

SEQ ID NO: 187 - DNA, 549 bp, Homo sapiens
  misc_feature (213)..(213): n is a, c, g, t or u
taggaatggagcccgagcagtctcgctctcagggccctgtgtggagtcactgtgctgtcccagctctggagacgcagaattccacatgaggaatgtggaattcagcatggggatgacgctgcttcacccagacttggaggagcgtggtgaattgcccgtgcccatgctctgatgtgcctctctggccgctgcgttcctcctttctccctgccntgggtcagtgcctgtaaacactgccctaaatcagcagggcccccgtcacttctgctttatgcacctttttcctcagacacattaatacaggggagttttgtttccaagggaccacatccagatggaggggctgtttttggtgatctgcactgccaaatgcccgagtgtccctgacagtcggagctgatgaggccaaggctgtgtgtggttcctctggatggccagaagaggaaccaaaacactgaattctgggccttcttaagagtggtgatcagcacattgtgatagaagcatatctgggaatgaacttggcctcaagcttttggccttttaatt

SEQ ID NO: 188 - DNA, 459 bp, Homo sapiens
  misc_feature (120)..(120): n is a, c, g, t or u
ctactctctgtctccataaactggtctattttggacatttcacataagcctccctggatcccagtttaagcatcctggggtttgtctgcctgccagagccatggtgccactggggctacntgtcctgtgggatgacaaggcaggtccaaacctttgcctgctctcccatccattccttttgtgttagtccatgtgtctcccgactgttctctccaacaacaacacagactgacaaaacctactgacttggagtcaggaacagactttgctattttctggctgtgtgatcctgatgagtcccttgaacctcctggacttgttcctcagcctaaaaaccaagactaataaatcaagtctatctcacagccttacgtggggatcaaaaaacatggagcatgtgaacacacattgtacatcacgaagctgtgtgcaaataaatatcgtgtaactccagccctt

SEQ ID NO: 189 - DNA, 430 bp, Homo sapiens
  misc_feature (112)..(112): n is a, c, g, t or u
gcccgaggcctgctgagaagcatgggggccttgggatagttccagaatgaggatgtgcgtttctagctgctttgcgccctcctcccccaaaaatctgctaccacaattccancccggcggcacgcccccaagactcctttgtcgccccaggggcgggacctgagctgtcggtttcaggagcccttcgtgacttcaaaagtcctgggcactgttgctcatgagtgctgcacaactgtcgccctctaaagccacctccatccctcactgggctggcctcctgagccttcggtgaggaaacggggttccgagttgcccgcctgagagcttaacagtctgactagaaaagggctaattcgctttctgtgcaaatctcttgagctaattatttaatctgaaacatggacaggtaaaggaccattggcgggcgtgg

SEQ ID NO: 190 - DNA, 406 bp, Homo sapiens
acatcaagcagctttctcgctttgctggagcttcaagtaagattgctccagtggaagcaccagatgctaaggtgaggatggtgatgatcgctggatcaccagaggctcggttcaaggctcagggaagaattatggaaaaatgaaagaagaaaacttcgttagtcctaaagaagaggtgaaacttgaagctcatatcagagtgccatcctttgctgctggcagttactggaaaaggaggcaaaacggtgaatgaacttcagaatttgtcaagtgcagaagttgttgtcccttgtgaccagacacctgatgagaatgaccaagtggttgtcaaaataactggtcacttctatgcttgccaggttgcccagagaaaaattcaggaaattctgactcaggtaaagcagca

SEQ ID NO: 191 - DNA, 555 bp, Homo sapiens
aatgctgtcagcccttaggcaagactaaattggaaagaaaggtgtctgccaaagaaaacaggcaggcccctgtcctccttcaaacatacagggaatcctggaatggagaaaacatagaatcagtgaaacaaagccgtagtccagtttctgtgttttcctgggacaatgaaaagaatgacaaggactcctggagtcaacttttcactgaagattctcaaggccagcgggtcattgcccacaacactagagctccttttcaagatgtaaccaataactggaattgggacttagggccgtttcctaacagtccttgggctcagtgccaggaggatgggccaactcaaaatctgaagcctgatttgctctttacccaggactctgaaggtaatcaagttatcagacaccaattctaaatgtttgaagctttgtttctaaaagtaccttgaaatgatagagatgtaggaaaatatagttgtgggtggagagaggagtgagtttgtttaggtgggaaggtggcatgggatgaagttgtcattactgagcatcttctctgtg

SEQ ID NO: 192 - DNA, 554 bp, Homo sapiens
gccctgctcagaggtcagagggtctgggcagaggagggaccacattcccctgccttgcccctgagcacttctggagactgcgtcctgtcctatctgctcaccatcacccttcctgcccgacggagctgcttctgctccctggggcatatggactgacccacctcctgctgagaaccttcccctaggccctgtgcagaagggctactgccccttaggcctcagctgggggaaaggcagttctggtgctgtagaggccctggtgcagaaagtgggacgtcttttttcctaaggtgtttaagcacaggcttgataagtttggtttttaaaaaataatctaggaaatgaataattctaaatctagtaatgaggaaactgagcatttcttttgccctccagggtgccaagaccctacatatgacagaacccttggcccttctccatgcctgtgggatctgtttctttaaagcactttgtactgttattcaggaggttgataatctccttgacccatgtctttctaccctaatccccacttccctgcagaatcaatctga

SEQ ID NO: 193 - DNA, 319 bp, Homo sapiens
acgcgtccaacatctcaaacttgatctccatctttggctccggcttctcggggctggtgagccgacagccggactcctcggagcagccgccgccgctcaacgggcagctgtgcgccaagcaggcgctcgccagcctcggcgcctggactcgagccattgtcgccttctagggacccccgagggcacagggacccggggccccgcggggctggggccagacaaagactcggcaaaggggcgagaggagggaacgagcgggcgccgggccactcggggctgagctgggggcgagcgggggcaggcggctgatgttttataa

SEQ ID NO: 194 - DNA, 218 bp, Homo sapiens
gaagactttctaaataatgataatcagagctgtactctctctggaggcaaacatcatggtcctgttgaagccctgaaacaaatgttatttaaccttcaagcagtacaagaacgttttaatcaaaataagaccacagatccaaaagaagagattaaacaagtttcagaagatgatttctctaaattacagttgaaggaaagtatgattcctattactag

SEQ ID NO: 195 - DNA, 246 bp, Homo sapiens
ccccacccaaatacaagtcccagtggaaaggaaaggtagtacctattcttctccatggggttcctaacaccctccattactctttcagtctccaagcactttgaatccatttttaaacattcaggttgccagacctgtcacacagtgggctctgatagggttacggagggggcctggctctcagtctctactctcctatgtcccatcagttggttggaggccaccttccagggggtatgggagaca

SEQ ID NO: 196 - DNA, 283 bp, Homo sapiens
caccttgacggttccagtgtctgtatttatgttgaaagtccaggtgaatgacatcatcagtcgtcagtacctgagccaagcagttgtagaagtgtttgtaaactacacgaagacaaattccacagtaactaaaagcaatggagcagtgctgataaaagtaccctacaaattaggacttagtttaactattattgcttacaaagatggctacgtgttgacccctctgccttggaaaaccagaagaatgccaatatattcatcagttacactttcactgttcccg

SEQ ID NO: 197 - DNA, 391 bp, Homo sapiens
cgtccgagtgtgagtcagtcagcgacaaggctcccagccctgccaccctgccagccacctcctcctccctgcccagcccagccaccccatcccatggctctcccagttcccatgggcctccagccacccaccctacctcccccactcccccttcgacagccagtggggccaccacagctgccaacgggggtagcttgaactgcctgcagacaccatcctccaccagcagggggcgcaagatgactgtcaacggcgctcccgtgccccccttaacttgaggccagggaccctctcccttcttccagccaagcctctccactccttccactttttctgggcccttttttccacctcttctactttccccagctcttcccaccttgggggtggg

SEQ ID NO: 198 - DNA, 563 bp, Homo sapiens
  misc_feature (116)..(116): n is a, c, g, t or u
  misc_feature (165)..(165): n is a, c, g, t or u
  misc_feature (168)..(168): n is a, c, g, t or u
  misc_feature (175)..(175): n is a, c, g, t or u
  misc_feature (225)..(225): n is a, c, g, t or u
agaggcaggcatagaggcttctccgccagcctcctctggacggcaggctcactgccaggccagcctccgagagggagagagagagagagaggacagcttgagccgggcccctgggnttggcctgctgtgattccactacacctggctgaggttcctctgcctgcnccngcccccnagtccccacccctgcccccagccccggggtgagtccattctcccaggtanccagctgcgcttgcttttctgtattttatttagacaagagatgggaatgaggtgggaggtggaagaagggagaagaaaggtgagtttgagctgccttccctagctttagaccctgggtgggctctgtgcagtcactggaggttgaagccaagtggggtgctgggaggagggagagggaggtcactggaaaggggagagcctgctggcacccaccgtggaggaggaaggcaagagggggtggaggggtgtggcagtggttttggcaaacgctaaagagcccttgcctccccatttcccatctgcaccccttctctcctccccaaatcaatacactagtt

SEQ ID NO: 199 - DNA, 591 bp, Homo sapiens
  misc_feature (60)..(84): n is a, c, g, t or u
  misc_feature (122)..(146): n is a, c, g, t or u
  misc_feature (182)..(200): n is a, c, g, t or u
  misc_feature (453)..(478): n is a, c, g, t or u
  misc_feature (495)..(536): n is a, c, g, t or u
  misc_feature (540)..(554): n is a, c, g, t or u
ctggagagccagtgcccatggcccgctgcgtctccacagggggtcgcccgccagcccaannnnnnnnnnnnnnnnnnnnnnnnnggatgcccaatacgagccaggtgccagggttcctgtcnnnnnnnnnnnnnnnnnnnnnnnnntggatattggtgccctcaagccaggtggacggcaannnnnnnnnnnnnnnnnnngagcacgagagctttgagaagcctcagctgctgactgtgaacctcaccgtgtactaccccccagaggtatccatctctggctatgataacaactggtaccttggccagaatgaggccaccctgacctgcgatgctcgcagcaacccagagcccacaggctataattggagcacgaccatgggtcccctgccaccctttgctgtggcccagggcgcccagctcctgatccgtcctgtggacaaaccaatcaacnnnnnnnnnnnnnnnnnnnnnnnnnntgccctaggagctcgcnnnnnnnnnnnnnnnnnnnnnnnnnnnnnnnnnnnnnnnnnnagcnnnnnnnnnnnnnnncatgtctcctattcagctgtgagcagagagaacagct

SEQ ID NO: 200 - DNA, 485 bp, Homo sapiens
catcagatttctgcagatctgctttaaagctgtacatttttgttacagtctaagatgtgttcttaaatcaccattccttcctggtcctcaccctccagggtggtctcacactgtaattagagctattgaggagtctttacagcaaattaagattcagatgccttgctaagtctagagttctagagttatgtttcagaaagtctaagaaacccacctcttgagaggtcagtaaagaggacttaatatttcatatctacaaaatgaccacaggattggatacagaacgagagttatcctggataactcagagctgagtactgctccagggtggtgtgcaatcttatattgatgcttgtgaatctgccatttgatttgtaggataaataaatatgtttaatattaacaacttccatcaaaactataataataatattatatctactgttgacctctaacaacaatcaggtgctgtattcagagtcata

SEQ ID NO: 201 - DNA, 432 bp, Homo sapiens
gccctgactgactgtattctctggccacattcaagtcccccattggtgggggcagagaagtaggaccaggccatccttggctccagagctcgaagaccccaagacagccctctgctctcagcggcgccacagagagcctgggctcagccttctgcatcaggacatggcctcgtccactgagggcacgatttaaacatttgacatcagaagctttatttgtaaacctcacacagataaggaccaagggctggcggtgtggccagaggacaggggaagctgaaggccccgtgcttgagctcggcagtcctgctccttgcagtgaagccaccatgggtgaccgtccagcctcacccggtggcctgcacagtgagggaagggcttcagggccatctgctcccagggcaggggacaggccaccaaggacctttggca

SEQ ID NO: 202 - DNA, 499 bp, Homo sapiens
  misc_feature (425)..(425): n is a, c, g, t or u
ggtggagaagctggcgcgtgagaacagcagcatgcggctggagctggacgccctgcgctccaagtacgaggcgctgcagaccttcgcgcgcaccgtggcccggggacctgtggcgccctccaaggtggccaccaccagcgtcatcaccatcgtcaagtccaccgagctctcctccacctccgtgcccttctcggctgcatcctagtgccggccgggggcggggggtggcgggcggcgggcggcgggcaggcgggtgggggcacacccctcgtacctgtcactgggatgcagactctcgacatccgagtccaagcgcaggcccctcgggcgcaggcagctcacaccaggaagagactgtattgcagggtgaagagtgggctcccgtgggcccagagctgcacgccggtccacagacacactcacgnccgccacctgctccccgcagatgtgtctgtgtgtgggaattggtatcttgcacccgtgggagtcgggacatata

SEQ ID NO: 203 - DNA, 569 bp, Homo sapiens
  misc_feature (107)..(107): n is a, c, g, t or u
ttccagcaccattcttttcctattaaattacactggcaaatttgattaaaaaaaacaactgactatatatgcttgtaaacatttccagattatgttattcttttaanctaaatatgtgtccttatgccaataccccactccatctattactgcagtgtatgataagtcttgaaatctagtagtgtaagttcttcaacgttgcccttaatttttaaaatcactcttgctatttaaaattgtttgtattacatggaaattttataatcagcttgccaatttctacaaaagtcctgctgagattttaattggtattttgcttgttctgcagcttaatgcaagaaaattatcttaacaatattgaatttttcaatctattaacatgttatatattactgtttacttaggattttttcacttttcctgccttgttttgaactgatattgtggttttaagtaattttttttatttctactattggcttagtaactatgccccactttttgattttgtagcacagttgaccattgaacaacacaagtttgaattgtgcatgtccaattgtctatgg

SEQ ID NO: 204 - DNA, 266 bp, Homo sapiens
ggagcagagacagagcgacccatacctggcccaggccccggccccgcaggcagctgaattcctgagcccagtgacaaccccttccccctgcactctgtcgtccgcccaagcctcaggccctgaggctgcagatgagacttgtccccagctggctgtccatcctcctggtgtcagcaagctgggtttgcagtgtcttccaagcgacggtgttcagaatgtgaaccagtgactctcgggcgcccctgtggtaactttgcaggcggccc

SEQ ID NO: 205 - DNA, 506 bp, Homo sapiens
  misc_feature (41)..(41): n is a, c, g, t or u
  misc_feature (99)..(99): n is a, c, g, t or u
  misc_feature (103)..(103): n is a, c, g, t or u
gcaagagctttatccagagctcccacctgatccgccaccgnccgcatccacacgggcaacaagccgcacaagtgtgcgggctgcggcaaaggcttccgntatnaaaacgcacctcgcgcagcaccagaagctgcacctgtgttaggggctgggtccgcgggaggctgccgtctggggagcctgtggggggtagatatcctgggactgacccaggggaaggaagtggggaaggggcgggagggacaatctgagagtgactggggagcctttggtgtttggggtttcctgaagtgggaggagtgttgagtaagttggtctttcccggtgctatacttgcctcctctccacggaagaattgttcaggagatgcgcttggggtgatgacttccttaaatacacgctgtagggggtgaagagcttggaggaccaggcactttgaggaagggcagttcgtgggctggggtgggaacaggatggcgggcaatagactagggtaggccgcgatg

SEQ ID NO: 206 - DNA, 439 bp, Homo sapiens
  misc_feature (53)..(53): n is a, c, g, t or u
  misc_feature (56)..(57): n is a, c, g, t or u
  misc_feature (60)..(62): n is a, c, g, t or u
  misc_feature (64)..(64): n is a, c, g, t or u
tcatttagccggtgtccactaactcagtgttgtgggccatttgtaaacccttntgnngtnnncnccaggcagacgtagggaaagaaagagaggatctgtatagacaagaaagctggccatgtgggaagtccagagctcaaaccatgtgccccagaggactggtgctggcattaagcctgtaaatcaaaggcttctttggcaggaccctgggctgttagaatcaccctagggagcagagccaggggacattttggcccctgactagcaaggcacaaccctataatggcagaagcccttctttcccctccccgtttcccaccagacccacttccttgatgggcctctagcacccttccaagctgatggggtcgggaatgtgagctggtaaaatgggcagtggaaggggctgtactgtttctttacatctcacggggactag

SEQ ID NO: 207 - DNA, 375 bp, Homo sapiens
aagaaatgctacctcggtgccatgttctggactccgcagaacaaggactttttggagaactccagcctataccctctattgccatgaccagtacttcagccactctggtgtcatctcaggctgatctccctgaattccacccttcagattcaatgcaaatcaggcactgttgcagaggttataaacatgagataccagccacgaccttgccagtaccttccttaggcaaccaccatacttattgtaacctgcctctgacgctactcaacggacagctaccccttaataacaccctgaaagatacccaggaatttcacaggaacagttctttgctgcctttatcctccaaagagcttagctttaccagtgatattt

SEQ ID NO: 208 - DNA, 502 bp, Homo sapiens
gttcttgagtacatagccaatgccaatgggagggatcccacttcttacccatccctgtatgaagatgctttgagagaggagggagagggagtctgagcatgagatgcaaccagggccagcgggcagggaaatgggccaatgcatgcttcagggccacacccagcagtttccctgtcctgtgtgaaatcaggcccattcttccctctgtgtttgatgagagaagtcagtgttctcagtagtagaaggcacagtgaatggaagggaacacattgtatactgcctttaggtttctcttccatcgggtgacttggagatttctttttgtttccctttggtaattttcaaatattgttcctgtaataaaagttttagttagcttcaacatctaagtgtatggatgatactgaccacacatgttgttttgcttatccatttcaagtgcaagtgtttgccattttgtaaaacattttgggaaatcttccatcttgctgtgatttgcaat

SEQ ID NO: 209 - DNA, 250 bp, Homo sapiens
  misc_feature (110)..(110): n is a, c, g, t or u
  misc_feature (112)..(112): n is a, c, g, t or u
  misc_feature (114)..(116): n is a, c, g, t or u
  misc_feature (118)..(119): n is a, c, g, t or u
  misc_feature (121)..(122): n is a, c, g, t or u
  misc_feature (124)..(124): n is a, c, g, t or u
  misc_feature (127)..(127): n is a, c, g, t or u
  misc_feature (129)..(129): n is a, c, g, t or u
  misc_feature (131)..(132): n is a, c, g, t or u
  misc_feature (135)..(135): n is a, c, g, t or u
  misc_feature (145)..(145): n is a, c, g, t or u
  misc_feature (152)..(152): n is a, c, g, t or u
  misc_feature (154)..(154): n is a, c, g, t or u
tcccctagcttggggtccagacagcccagtggacccaggcgcctgagcaggagggtaacccaggccacccggccccttcggccctctcggccccaccccctgcagccggngncnnncnncnncnacnananngcngcgagaagangacagangngactgagcaaaggggggtgggctccaggcgacccctagcccaattctgcccctccatcccaaggggcagagaaattgtctttctttgctgactcct

SEQ ID NO: 210 - DNA, 440 bp, Homo sapiens
  misc_feature (142)..(144): n is a, c, g, t or u
tttggacatgtccattttggaagaaacttttgtgttaaaataaactaatatattatgggctagaacataaaattcaccaagaatttcaagataaaaatactaatgttttgcttgtttgggttatttcaaacaataactttgnnntctataattttttcaccaccgaccctctacctccttgcatgctcattctcctgtgtggctagatgcatttcgggtgttttgaatattatttcagagcaagtatcattccagaaaataagtttaaagtttgaaatgtttattttttgtaacccatgaatcttcagcttaagtatcttctgacataaaagcattttcataattataaaagtgctgatattactctccacagtattatatctgatcctgcaaagtagttcagataccagagaatactcttaaacattttgactcacgca

SEQ ID NO: 211 - DNA, 573 bp, Homo sapiens
ggactcagggagtacacacttaccagtgcccttaaagatagccgttttcccccaatgacaagggatgagctgccacggcttttctgctcagtgtctctgctcactaactttgaagatgtctgtgattatttggactgggaggtgggtgtacatggcattagaatagaattcatcaatgaaaaaggatcaaaacgcaccgccacctacctaccggaggttgcaaaggagcaaggatgggaccatatacagaccatagactccttattgaggaaaggaggatacaaagctccgattactaatgaattcaggaaaaccataaaactgaccaggtatcgtagtgaaaagatgaccctgagctatgctgaataccttgctcatcgccagcatcatcatttccaaaatggcattgggcatccccttccgccatacaaccattattcctgacactgagccgcacaaccagtcactgggcctctctgcagacctcttcccaggagaccctacaccttcttggtctagctatctcttttactgtaccattttatgatgatagtttccgttgccatggtgaag

SEQ ID NO: 212 - DNA, 514 bp, Homo sapiens
cgtccttgtcatatccttttaactaggcatctcagagaagcagagacagggcagccttcgtcctgggggaaaagggaccctcaggatggcatgagaggtcctcaatcccaagtgtggaactgtccccctcaacttgttaaaatgcagatttctgggtcttgccaatggggcctgggactccatgtgacaactggcccaggagcttctgatgtcacacagaattctgcagtcccaagctccagccccgacctgctctgctgttcctaggtgactgccctcacactgctgaccacagtggatttctccccctgctgctcgggctcagctggggtcagccctgcttataaggtcaactgtgcaaaaccttatactggccaagaacaaactagtgctgggggaggagggctgggtgccccggccactggtggagtccccaggaaatcctcagagctgttgcgaggatgagacacatttgtggacacgtccacctgtcctcctgaccgtctggagagaa

SEQ ID NO: 213 - DNA, 504 bp, Homo sapiens
ccggctatgggctcgagccgagttccttcaacatgcactgcgcgccctttgagcagaacctctccggggtgtgtcccggcgactccgccaaggcggcgggcgccaaggagcagagggactcggacttggcggccgagagtaacttccggatctacccctggatgcgaagctcaggaactgaccgcaaacgaggccgccagacctacacccgctaccagaccctggagctggagaaagaatttcactacaatcgctacctgacgcggcggcggcgcatcgagatcgcgcacacgctctgcctcacggaaagacagatcaagatttggtttcagaaccggcgcatgaagtggaaaaaggagaacaagaccgcgggcccggggaccaccggccaagacagggctgaagcagaggaggaagaggaagagtgagggatggagaaagggcagaggaagagacatgagaaagggagaggaagagaagcccagctctgggaactgaatcagg

SEQ ID NO: 214 - DNA, 529 bp, Homo sapiens
gaaattattcactccgtatactgaaacagaaataaacgaggaagaacttacaaagccaagactcttgtgggctctttattttaatatgagagattcctcgggaatcagcagaagctcgtataatggcttgccttccaatgtttatgtctgctctgggcctgactgtggcctgggaaatgagcatgctgtcaagcaagctgaaacacttttccaggagatctttccaactgaagaattctgccctccacctccaaatccagaagacattatctttgatggtgatgataagcagccagaggctcctggaaccaataatgtagtaatggccaaactagaatcctctgaggaaagcaaaaacctagaaagcccagagaagcaccttcaaaattagaaaagagcaatctcgaaatgctgttttggacctccttcatggcatcagaattttctcatttaaaggacagtttcccatatgagtaattagaagtggttatatatgatgaatgctatgcagatgttgtctttaactctc

SEQ ID NO: 215 - DNA, 480 bp, Homo sapiens
tctttgctctagtattccacggtgcctctgacatgagaacaggatggagactggcttctgatttgacatgcattttgtaggtatgatccaaaatagcttggaaactatcccagtcttcaaccatcccattttttagaggtgaaatggcctccatattctccctcggaacacgcagagcattagtatctatgtagtaggtgggaccgccttgtttgcctttatcgccatctatttccattaatgtgcttccgtcatctctttctaccaccataccaatagctgtaggaaaatccaccttggggcagtcctcaccagcataaccagctctcacagtataggatccaatgtcaaaaacaagggctccaacttcatctcccccgtaccacgccgccgctcatggctgctgccggcgcgactcctaccctaagggctaactggcgaagtgactgcagtggccgcgactgcgagtctcgaggagcg

SEQ ID NO: 216 - DNA, 282 bp, Homo sapiens
tggaagcatttgttgcctcgatcttccactttagaaaaatgaagtttctccttttctttgggagaggatatatctgaatacttgccttcttggcatttatacattcaaagctcagtgctagattagagctattatttgcatagtcttttggtattgcccacttttggcattaccatattatttgacaattagaaggaatagggaaggaatattacatgactgtaaaagagttggttatattttatgttgacttcaagggttccatttgaactattatgggca

SEQ ID NO: 217 - DNA, 563 bp, Homo sapiens
gcaggaccaccttgaattctgccctgacacactggattggagagcagcagaacccagggcctggcccaccaagctggagtgggaaaggcacaagattcgggccaggcagaacagggcctacctggagagggactgccctgcacagctgcagcagttgctggagctggggagaggtgttttggaccaacaagtgaccactctacggtgtcgggccttgaactactacccccagaacatcaccatgaagtggctgaaggataagcagccaatggatgccaaggagttcgaacctaaagacgtattgcccaatggggatgggacctaccagggctggataaccttggctgtaccccctggggaagagcagagatatacgtgccaggtggagcacccaggcctggatcagcccctcattgtgatctgggagccctcaccgtctggcaccctagtcattggagtcatcagtggaattgctgtttttgtcgtcatcttgttcattggaattttgttcataatattaaggaagaggcagggttcaagaggagccatggggcactacgtct

SEQ ID NO: 218 - DNA, 391 bp, Homo sapiens
  misc_feature (100)..(100): n is a, c, g, t or u
  misc_feature (112)..(112): n is a, c, g, t or u
gccagacaacctgagtgtgaatccagcttcaccacttcattcattcactcacccattcattcaacaacatatttgaagcacatactttgtaccagggacntttccaggcacnggactacagctatgaacaagacaaacagtccctagcctcccaagagccgtcacttcagaagggcagacatgacacgcaaacaaaatgatgccaggtggtaccaagtgccttggggaaacagtgccacctttctgagaccgtttctccatccgtccatggagctgataacaccagtccctcagggtggaggtgaagactaagaggttgctttgagagggggaacttggtggctttttttcaccacctagaacctggcacatactaagctctcaataaaag

SEQ ID NO: 219 - DNA, 474 bp, Homo sapiens
  misc_feature (417)..(417): n is a, c, g, t or u
aactacgcctggtacaagctggcagaggaggtttctgggcgcacagaagtcactgtgaaacagccagacagccgcctgaggctcagccaagcccaggggaacctgtcggttctggagacccggcaggtacagctggagtgtgtggttctcaaccgcaccagcataacctcccagctcatggtggaatggtttgtatggaagcccaaccaccctgagcgggagactgtggcccgcttgagccgtgacgccaccttccactatggagagcaggcagccaagaacaatctgaaggggcggctgcatttggagagtccttcccccggcgtgtaccgtctcttcatccagaacgtggctgtgcaggacagcgggacctacagctgccatgtggaggagtggctgcccagccccagtggcatntggtataagcgggcagaggacaccgctgggcagacagctctgacagtcatgcgacca

SEQ ID NO: 220 - DNA, 471 bp, Homo sapiens
  misc_feature (125)..(125): n is a, c, g, t or u
  misc_feature (133)..(133): n is a, c, g, t or u
gggaccttgtaacttccttgcaagttaagtgagctatcctgtcacggttttatgttgagtgagtgggaagctgggactctgttttacagccatctgtactggagcctggacaaaccactggtctntatgggangccccagcctcacatttccctggcaaggagagagaggtttagccatgtcctgggtctaggattacagcccagagatgggcacttaagaagacctggtcattggtccagacttgggccaaggctctcctctgtgagggatgggttttactggtgaattacctgtgtggagaagctatcagggccatgtttagcacactgaagggaccagtctccaccaagcactttaacatccctccagccagcatagattgatctcgtgttacagagagggcaaggtttttggcccctgtttgcagactccatgtcttaatcagagaccacagttttctctttgttcc

SEQ ID NO: 221 - DNA, 527 bp, Homo sapiens
  misc_feature (408)..(408): n is a, c, g, t or u
  misc_feature (439)..(439): n is a, c, g, t or u
taaataatgtcctctacgtgccggtgtggaagtagcccggatgcaattgaatgaacaacagacggtgctttccaggacggcgctgtgctttccaggatggtgctgtgctttcattcatttgggtagctcctctgtgagcctcccagcgccgactgcagagcccccactctccagcctgcaagaccccgaaattcaagccacacaaagaaaggaggagggggccgttggcatttactgaaccttataaaactgtcagcaaaacagcccttaggcttggactccctgctagccgggttttacggtgctgaagtcagcatcttgattcagctgcataaataatctcctgcagtcctgcaaggcctggggtaggagagggtatggggaccagggcactctgtaagggctggnataggaaccccagggaataagacagaccaantgcgggacttcagactccactgcagccgggatcgggttgttgttaatttcttaagcaatttctaaattctgtattgactctctcatgc

SEQ ID NO: 222 - DNA, 310 bp, Homo sapiens
  misc_feature (43)..(43): n is a, c, g, t or u
  misc_feature (110)..(110): n is a, c, g, t or u
  misc_feature (115)..(115): n is a, c, g, t or u
  misc_feature (189)..(189): n is a, c, g, t or u
  misc_feature (236)..(236): n is a, c, g, t or u
  misc_feature (252)..(252): n is a, c, g, t or u
atacatgtggttatcttttgccctgttgtgatggataatttgnaaagaagtgggtttatgtcaccttctcaccttcttataagaaagctctgagaatgggcatttttgtnttttnttgttgttgttgagatggagtctgccacccaggctggagtccagtggcgtgatcatacctcactgcagcttcancttcctgggctcaagtaatcctcccaccccagcctcccaggtagctngtactataggtgtgcnccaccacgcccagcaaatttttaaatttattatagagtgggaggcagggtgcggtggc

SEQ ID NO: 223 - DNA, 283 bp, Homo sapiens
  misc_feature (169)..(169): n is a, c, g, t or u
cactgtctgtgtgagtccattcacttcaataccagagccacctctttgtttcctatttactaagaagccataccagcatgagatctccttgatagtgttaaatcccactgtggaaagattgaaaaatatctcccagccttaccagaggttacgatctagtgtggaggcnaaagacattgagaagaaaaaagcaggtgcctcctcctggctctcctgttaggttaacataatcataattcccctttgaaatgtctcccacatttgccctttaacttcctattgc

SEQ ID NO: 224 - DNA, 499 bp, Homo sapiens
gacgactacggtctggacaactttgacacacagttcaccagcgagcccgtgcagctgaccccagacgatgaggatgccataaagaggatcgaccagtcagagttcgaaggctttgagtatatcaacccattattgctgtccaccgaggagtcggtgtgaggccgcgtgcgtctctgtcgtggacacgcgtgattgaccctttaactgtatccttaaccaccgcatatgcatgccaggctgggcacggctccgagggcggccagggacagacgcttgcgccgagaccgcagagggaagcgtcagcgggcgctgctgggagcagaacagtccctcacacctggcccggcaggcagcttcgtgctggaggaacttgctgctgtgcctgcgtcgcggcggatccgcggggaccctgccgagggggctgtcatgcggtttccaaggtgcacattttccacggaaacagaactcgatgcactgacctgctccgccaggaaagtga

SEQ ID NO: 225 - DNA, 562 bp, Homo sapiens
tcttctgtggaggaatggcatcccaggccttcacccctccaggtcagccgtggctgccggccaagatggccgcgtgggcagcctcacattccttctcggcttttggccccatgtcctcggcactcaggtctgcagttcagcccaagtgttgagactcaggtatgcagctcagggcggccttaattaaccctcccatgggcctgggcaccgcctgcgcctcatcaactctgggctgctggttttgttcctgacgctgcagcctgacactgtgggcgggggtgcagtttgcgatggaaggctgcctccgaatcgaggaagccttgaccttgggaggggcctgccttttcgctgggcttgcctttctctgggcagcgttcgctcagcacttcagtgcggccgattcccctgggactgaattcacaccagccacgacgacttcccggctacttcacgttctctatgtttgcagctgttctttggtggcagaaaaagatgatttttcttccccccactcccattcccttttgttagtttctctccctgaaccacattttgagctgag

SEQ ID NO: 226 - DNA, 47 bp, Homo sapiens
ttccagaatttcttccgaggtagtatggttttcttcataggataaag

SEQ ID NO: 227 - DNA, 523 bp, Homo sapiens
  misc_feature (476)..(476): n is a, c, g, t or u
aggcagcgctgcggagaggagcggcagagtgggttgtctgccgcaggcaaccaggcaagtgtgtcggggctggggtgtgaatgccagcctgtgagtcccggaactatgtgggtacccctacccctcacagaagccaagggcatggaggaggtccctccacagtgacaacggtgtggggtaggggaggtgcattcaggacaccacccagggacagtgcctatgtgatcacctcttaaaggctaagcttaggggcatttcccaaagtggggacagagggcaggacgcccaggctgggggctctcctcgcccgccctggtgtctgacagcctcaaggaaggagcagtgcctgtgtcagccatggggcccttggagctgccgctggtgcctagggggcctgggtttctgcccaggcagccagtggctgttgggagcctctgtttcccctgtgctgggggccttgagtgctatgctagcangggcctggccccaagtgtgagtgatgagcaataaacgtaccgtcccc

SEQ ID NO: 228 - DNA, 138 bp, Homo sapiens
aagtgcgaagtcagggatggtctaagagggctgagaggagaattccggaacctcaggaccttgctcactggctgctggctggggctgtgaagctgtccagtctagaactcaaagagtgatggtacaggctttagagcc

SEQ ID NO: 229 - DNA, 396 bp, Homo sapiens
  misc_feature (198)..(198): n is a, c, g, t or u
gggctgggtacctcttctggttgctgagtggagtgcaccagcagccccaccccagagaagccctgttggaagcgctgtgggaatcccccaaggtaggggagtggacaccataaggaaggggaggagtgccagctccatatgcggtctcccccatcagtcaggccagcagcgggttcagctgcctctgggcagccctancccatacagacagggagacctccctcccgatcttctgtgaatagtcccttatacccctgcttatgcctcaggggctcctccacccttttgtcttcatactgcatatgaaaactgcccttgtatatgtggatatctgaatgtgtcagtgaaggcctatatgaatgtgcacatgtgggtatgttctcagccatgtgtata

SEQ ID NO: 230 - DNA, 432 bp, Homo sapiens
  misc_feature (39)..(39): n is a, c, g, t or u
gaactaaaggagccatctctctcccctctcctccgttcncgagaggaggggtgggtctcagacgtttttcctatggacttatttcttccatgtccaggactttgcacaactttggttttaaaagctgttgaaaaataggaaaacaaagggcattgttcacagatagggccaagtctccccttgcaagggtgcctctgttctgtccctgcccccacctcaccttctctactcctccagtaagttggcagttttggtgccaaaccccaaatctccaaagagacatgccaggcaagacaaacccccaaacacctcctttccggtggccttggaaacagattgctccgagctggagaatgtcgggtgaggtgtatgggagaggaggggagagttagaacttgtgcctttgggagtaaggggtaactgcctggaggg

SEQ ID NO: 231 - DNA, 549 bp, Homo sapiens
atcagtgccagaaattccttacctaaagtggcatatgcgacggccatggactggttcatagccgtctgttatgcctttgtattttctgcactgattgaatttgccactgtcaactatttcaccaagcggagttgggcttgggaaggcaagaaggtgccagaggccctggagatgaagaagaaaacaccagcagccccagcaaagaaaaccagcactaccttcaacatcgtggggaccacctatcccatcaacctggccaaggacactgaattttccaccatctccaagggcgctgctcccagtgcctcctcaaccccaacaatcattgcttcacccaaggccacctacgtgcaggacagcccgactgagaccaagacctacaacagtgtcagcaaggttgacaaaatttcccgcatcatctttcctgtgctctttgccatattcaatctggtctattgggccacatatgtcaaccgggagtcagctatcaagggcatgatccgcaaacagtagatagtggcagtgcagcaaccagagcactgtataccc

SEQ ID NO: 232 - DNA, 554 bp, Homo sapiens
gatgagtccatctcacttgctcagaactttgcctggtgagagcggttacaagcgaacaaggtggaaatgaaagaaaccctgactttcccactaggaaggaagagactgttccttcttgtgatgtactctgaagaaaaattctaggatttggacagatttcttgggttataaaacatgattttcttctctgtttcttgggcttttataatgggtactgttgttttcttgcaaagctttaatgattccataaggacttgtataaagtttatgggagaattttcaatgtagatgtgaatggcagaaacccaagaatctgtgtgaggttgaataagatcctgtgtctccagagaggtctgatggggagacacagatctaaattttaaaggtggtttgggccttctcaatcatatattaaggtccttttatgttatagataagtaaattaaggcccagaaagattaatagcccaaggtcccaagacctgcttgagacctgtgccccatttctgactaatattcttcatgatattgtatcactctgtatcaaaaccaacc

SEQ ID NO: 233 - DNA, 539 bp, Homo sapiens
gatggtgcagtacctgctagcactttgctgcagaatgcctctgcactcagttctgcaaatgtactgttttagtttcatttaaaacccctttttttgtgagaagatttcaaacatcaggcaagtttgtaatgaattcaagctgagttctctcgagggacaaacatgtataactacagttccagtgtcagtgccagctgtcaggttttcactgtgcagctagggctgcctgcatacccagtcatgtaaaccaaattcactctagaatcggccaggtcttaccaaaatgcaaatagaatacaaagcaactggaaatatatttcgtaatttcattttatgtgtgattttaaaagttaagctacttcaaaactcatctgtctaacttattttcactaataagtgtaacttgcctggaatttggcagatctaagctgggcttgggctagatggtttcaagcctgagtcattaagatgtgaaatttacagaaacaacagaggattgaggaacaagttaaaggacactctaatggtgcagtctgcat

SEQ ID NO: 234 - DNA, 431 bp, Homo sapiens
  misc_feature (102)..(102): n is a, c, g, t or u
gtgagcatggaagtagatcttccccggtcaagcccccagaaggacccagccctgcggacaccttgaccgaaacctgtgagagctccggaaatagaggaaccnagcattccctctggaatacatcagcactgttgcctttgaggctggcctgcttgaatgcacacctgagctccggattcacagtggaggaagccagatgccatgtcatgagggtgctcaagcaactttttggagatgtatgtatggagagaaactgaggcctcctgccaacagccagcactaacttggcaagcatgtttgagagccacctgggaagtggagccttcagccccagttaagccttcagatgagactgcagtcctggccaccatctggactgcaacttcacaagagctcctaagccagagccatgcagatggattcttggcccc

SEQ ID NO: 235 - DNA, 403 bp, Homo sapiens
  misc_feature (139)..(139): n is a, c, g, t or u
gatctcattgcctttttatgccgattaacatgcttttagcccctactgagcttatagttaacagaagtttccaggtctttcttcacctgaactgtgtctaaagcaagttccctccaccttctgtatttatacgcttgantttttaaaacctaaatgttgggcttcacatttgttccttgtaaatttcatcttggtgattgcagtctaccctctggcctttaaaaattgtctgagccttgattcgatcatgaaaccagcttacccttcccctgtgtgctggccccagttttctaaccaggtgttgaatgaactggatggactctgccagatccctccgtgcaaggctggaatcagtccattgttcaactgtgccctttggggctgtggttcatttggctctgat

SEQ ID NO: 236 - DNA, 257 bp, Homo sapiens
ctgctggaaaggcatccttgctgcagctgtgagtgtgatgggacagcagagtcactcctgcatgggattctagggctgggggtcccagaggggtggcctccgcccctcctgggggccgaggactgtcaccatgtcactacggcactctccagctgctgaccaaagccctcgctaaccgcagccctgccatactctgggtctttcctctggagcaaggtgaagagactgcagcgaggcgtggaattgggaagctcttc

SEQ ID NO: 237 - DNA, 446 bp, Homo sapiens
actgtgactgcgcgcaggacgagaactgcaagtccaccaagcgcgccattgagccgtgcctgccccggacgagcggcggcggcgcgggcggccccggcgcgggcggggtcatgggctgcaccgaggcccggcggcgctgcgaccgcgacagccgctgcaacctggcgctgagccgctacctgacctactgcggcaaagtcttcaacgggctgcgctgcacggacgaatgccgcaccgtcattgaggacatgctggctatgcccaaggcggcgctgctcaacgactgcgtgtgcgacggcctcgagcggcccatctgcgagtcggtcaaggagaacatggcccgcctgtgcttcggcgccgagctgggcaacggccccggcagcagcggctcggacgggggcctggacgactactacgatgaggactacgatgacgagcagcgcacc

SEQ ID NO: 238 - DNA, 340 bp, Homo sapiens
ggaacagaggagagatgccggctggaggacacagcaaatttgaaccaagaggagcttggaggaagcccgagcgacctggaggggactggctgaccttcctcattcttttcaagtgtgaataataaccaagcccagtttggcaactccttgagggtgaggacgaagccccattctcctttttggaacttggtggggctcaggaagcaggttctctccagtcggtggctttcctttctgttgcgggtctcttgagggcctgccttcatgaaggcacatgagtgactcatcatttgtgaattaattgctatatgtgaagggcatctgagaacaaattatcttc

SEQ ID NO: 239 - DNA, 560 bp, Homo sapiens
tgaccgccatgtggctgtgtctgaccgcctgcgatactcggccatcatgcatggagggctgtgtgctaggttggccatcacatcctgggtcagtggctccatcaactctcttgtgcagactgctatcacctttcagctgcccatgtgcactaacaagtttattgatcacatatcctgtgaactcctagctgtggtcaggctggcttgtgtggacacctcctccaatgaggctgccatcatggtgtctagcattgttcttctgatgacacctttctgcctggttctgttgtcctacatccggatcatctccaccatcctaaagatccagtccagagaaggaagaaagaaagccttccacacgtgtgcctctcacctcacggtggttgccctgtgctacggcacaacgattttcacttacatccagccccactctggtccctcagtccttcaagagaagctgatctctgtcttctatgccattgttatgcctctgctgaaccctgtgatttatagtctaaggaataaagaggtgaagggggcctggcataaactattagaga

SEQ ID NO: 240 - DNA, 524 bp, Homo sapiens
ggaaatagtttgttcatatggccaaattataaagggacttagtaaaagaaagctatgttttctgattacgaaggaaatctatgctcacagtgggaaaacaagaaaatgtggcaaagcacaggtaagaaaataaaaatcaataatatcaacattatgaatattttaggtacttaggaatttggggtagaatgatggaaagcaaactgttaattatagctgtatatttcagtgtagaggctacaggtgccttgcatttgttttcttataaaatctgttcccatacattttacttactttatttgaatttaggaaactttcattaggtagccatttttattttctgtttctttaatcattttactttgaaataattttaaatttacagaaaatttgcaaaaatagtgtagaaatttcccatttgcctttatccagcttcctgtagtgttgccattttatgtaaccatagtacaattattgaaaccaagacattaactttgagaggctgctactactctaagaaccat

SEQ ID NO: 241 - DNA, 504 bp, Homo sapiens
  misc_feature (71)..(72): n is a, c, g, t or u
  misc_feature (197)..(197): n is a, c, g, t or u
  misc_feature (219)..(219): n is a, c, g, t or u
  misc_feature (233)..(233): n is a, c, g, t or u
  misc_feature (289)..(289): n is a, c, g, t or u
  misc_feature (309)..(309): n is a, c, g, t or u
  misc_feature (346)..(346): n is a, c, g, t or u
  misc_feature (390)..(390): n is a, c, g, t or u
  misc_feature (395)..(395): n is a, c, g, t or u
  misc_feature (474)..(474): n is a, c, g, t or u
tcctgtgtcttgacccagaaaattgtgacatgtaaaaagaataaattcctggtttaagccagtaaggttannggtacattgttacatctcagataattaaaaccttgaaaaactcatgagagatcacaagtagaaccttgatctgaaacatggcatgtggcgatttatattgagtattaggttaaaaatgcaagaanggagcatagttaatattttacnttaaagctaaaacnataattgcctacttaaaattttcagttaattaggttgtcactttttgttcttaacnaagaaatcaactagttttantccataaacagttagaactgatgcacacatccgtttntccttactcattttaaacagctatctgaaataggaagtgtaatntaatntttaaagaatctgaaaacatgacagaaatgtttaaactataaacatatattgtatatgttagcatattgtatacattgnatattaacataagctagaatcattgacata

SEQ ID NO: 242 - DNA, 317 bp, Homo sapiens
cgaaccactcagggtcctgtggacgctcacctagctgcaatggctacagaggctggaagatggcagcccccggactgggcagatcttcaagcagacctacagcaagttcgacacaaactcacacaacgatgacgcactactcaagaactacgggctgctctactgcttcaggaaggacatggacaaggtcgagacattcctgcgcatcgtgcagtgccgctctgtggagggcagctgtggcttctagctgcccgggtggcatccctgtgacccctccccagtgcctctcctggccttggaagttgccactccagtgc

SEQ ID NO: 243 - DNA, 437 bp, Homo sapiens
aatgccggctggctcagtgatggctctgtgcaatatcccatcacaaagcccagagagccctgtgggggccagaacacagtgcccggagtcaggaactacggattttgggataaagataaaagcagatatgatgttttctgttttacatccaatttcaatggccgtttttactatctgatccaccccaccaaactgacctatgatgaagcggtgcaagcttgtctcaatgatggtgctcagattgcaaaagtgggccagatatttgctgcctggaaaattctcggatatgaccgctgtgatgcgggctggttggcggatggcagcgtccgctaccccatctctaggccaagaaggcgctgcagtcctactgaggctgcagtgcgcttcgtgggttttccagataaaaagcataagctgtatggtgtctactgcttcag

SEQ ID NO: 244 - DNA, 389 bp, Homo sapiens
  misc_feature (299)..(299): n is a, c, g, t or u
tagatcatgccctcattgggcttacatgctgttgaaaagataggatataaatccatgaaaatttttacaatgctatttattaacaatacatgacaagagtactagaaatgttacttgtgactattttgtctattctagccaagctggatgcctggctgtttctcagttatactaaatgagttctgctctcagggtcttcatacttgcccttccctctgcctgcaacactcttcctccagttttttttttttttttttggctctctccatcactttaggtctccattaaaactgtcagcnttcagggaagttgccttccctgaccacaaccacactaattcaaataccaatccttccccgcctccgtttggtaactctctagtctcttat

SEQ ID NO: 245 - DNA, 136 bp, Homo sapiens
  misc_feature (68)..(69): n is a, c, g, t or u
  misc_feature (91)..(91): n is a, c, g, t or u
gccccaaggtctttaagtatctctgtcacttattagctcaccagagaagacacaggaatgagaggccnnttgtttgtcccgagtgtcaaanaaggcttcttccagatatcagacctacgggtgcatcagataattc

SEQ ID NO: 246 - DNA, 369 bp, Homo sapiens
ggccctgggctaagtcggggatgaaggcgggagctgctgtgctggactgcagctcagcacagagacagtgagcctagattgcagagctgcccagggagggatgtcaccttgggggatggaggctgcaggtgctcctcagaccttagggaaacatttgggagggagcttgttgaggagatacaggcacctcagggtggctgggctggatggactttgatgacccttccttttttgagacctgatggttctctaatttgggaatcatttccaaagatgggtctaaaaatccttgtttcattggaaataatgagtttgctatgatgcttaagaccaagcatgtcaccatttgttattactgcacttttccct

SEQ ID NO: 247 - DNA, 444 bp, Homo sapiens
gaggcttttgacacagttattagttaaatcaaatgttcaaaaatacggagcagtgcctagtatctggagagcagcactaccatttattctttcatttatagttgggaaagtttttgacggtactaacaaagtggtcgcaggagattttggaacggctggtttaaatggcttcaggagacttcagttttttgtttagctacatgattgaatgcataataaatgctttgtgcttctgactatcaatacctaaagaaagtgcatcagtgaagagatgcaagactttcaactgactggcaaaaagcaagctttagcttgtcttataggatgcttagtttgccactacacttcagaccaatgggacagtcatagatggtgtgacagtgtttaaacgcaacaaaaggctacatttccatggggccagcactgtcatgagcctcactaagc

SEQ ID NO: 248 - DNA, 394 bp, Homo sapiens
ggggcggcggaagcgagtagagtttgtgacatttgtgccagcccctccagcccagtcacctgaggagcctgtaggggcccctgctgtgcagtccatccttgtggcaggcgaggaggacatccgctgggtgtgtgaggacatggggctgaaggaccctgaggagcttcgcaactacatggagaggatccggggcagctcctgaccctccacagccacctggtcagccaccagctggggcaacgagggtggaggtcccactgagcctctcgcctgcccccgccactcgtctggtgcttgttgatccaagtcccctgcctggtcccccacaaggactcccatccaggccccctctgccctgccccttgtcatggaccatggtcgtgaggaagggctc

SEQ ID NO: 249 - DNA, 414 bp, Homo sapiens
tttgctttgggtactgtgataactactttttatactttatcccatttaattataaaaaccactcttgagaagtaatttttattttcagaaccattttacagatttaaaataaacaggtttgaggaattagtttaacttatccaaagtttcgtggctattaagttctagtatttggagtcaaatgcaagtctgtctaaatctagagcccatgttctttaactgcaacactataatgtctcaccccgtcctagtcccaccaattagtcaactcttttagggcagaagtctgtctaattcatctttgcttcctgttactttatatttaattaaaaattttagtgactttttaacttgtaaattgtagctgattttacatttatcttcctgaaggaaactctgtatcattttgtcttt

SEQ ID NO: 250 - DNA, 268 bp, Homo sapiens
cttttattagaatgccatgcctgcttatgttatgcatgtattttataataatttaatctattttacaattttaaactcaaatatgatttagtattatgcacataatacaaacagtagtggtgagcaaacgtgtgtttcccccacatgtgcagaatatgatggattttatgaaaataaatattcttaactccaggaaatatgatctatatggttccttaaaagattttccaatacactgaaaatttagttccttatgttcattgtataa

SEQ ID NO: 251 - DNA, 443 bp, Homo sapiens
  misc_feature (131)..(132): n is a, c, g, t or u
  misc_feature (156)..(156): n is a, c, g, t or u
  misc_feature (187)..(188): n is a, c, g, t or u
  misc_feature (230)..(230): n is a, c, g, t or u
cgtgcagcagatcccaggagttggaaaagttaaagctccccttctcctccagaagtttccaagcatccagcaactgagtaatgcttccattggggaactggagcaggtggtcggacaagcagtggcacagnnagatccatgccttcttcacgcagncccaggtgagggctggcctcagggccacggnnatcttctcccgagaccacaaacaccaggatcttgttttcagntttaaaaaccaagagaatgggccgggtgcactggctcacgcctctaatctcagcactttgggaggccgaagacagcggatcatctgaggtcaggagttcaagaccagcctggccaacatggagaaacccctaaaaataggaacaattagccaggcatggtgacaggtgcctgtaatcccagctacttgggaggccgaggcatgagaatcactt

SEQ ID NO: 252 - DNA, 281 bp, Homo sapiens
gagaaattcccacactaaaaacactacaagtttttggaatcgtgccagatggtacccttcaactgttaaaggaagcccttcctcatctacagattaattgctcccatttcaccaccattgccaggccaactattggcaacaaaaagaaccaggagatatggggcatcaaatgccgactgacactgcaaaagcccagttgtctatgaagtatttattgcaggatggtgtctcttctttagaacagggaaaataggcaggaagcccaattgctggagtactta

SEQ ID NO: 253 - DNA, 249 bp, Homo sapiens
ccaaatatctagattctgatcccttttgaggtcctagaccctttgagaaactgatgaagccaggcacctccttcctcaggaaaatgctggtgtacaaatacacacaaagctcttcaggcagctgatagatttcccccagagagctattcaaggacttcctaaggtgggtggactgcagggttaggacacctgctatagaggtgacatttttccaaggacaagcagggactttggtcttgactgttctct

SEQ ID NO: 254 - DNA, 259 bp, Homo sapiens
agaagagcctgaacctcaacatcttcctgaagcaatttaagtgctccaacgaggaggtcgctgctatgatccgggctggagataccaccaagtttgatgtggaggttctcaaacaactccttaagctccttcccgagaagcacgagattgaaaacctgcgggcattcacagaggagcgagccaagctggccagcgccgaccacttctacctcctcctgctggccattccctgctaccagctgcgaatcgagtgcatgct

SEQ ID NO: 255 - DNA, 535 bp, Homo sapiens
aaattctgcaatgaaccctacaccgaccggacagaagaaagggaagaatccaaagaggaagaagactggtccctccgacctgtcctttcgggagctgagaaagatgacgaagctgagcgtctcagagaaacaacagaagacggagaagacccgccaggctacaccaccgacatgagaacagataaagaagctgactcaaatggcagagggcagcctaaaggagaaacaactggcaattatcccgggtaatatgatcttggctgccttgatggtaattaccgcggcggtaagtctccctgctgtctggactgaagaaaattttacatactggcttctgttccatttcctcctttaattaggccagttacttggatggattcccctattgaagtttatacaaatgatagtattttggatgcctgggccgattgatgatggctgtcctgcacagcctgagaaggagggtatgttgatgaatgtaactggtatgaataccctccaatttgtttaggaattgctccttgatgtttaccat

SEQ ID NO: 256 - DNA, 230 bp, Homo sapiens
ggaagtaatgacttttttgcccatttactcactgagtcccataatgtggtaaatgtataatgctgacatttgttccgtccttatagattgaggatagtacggccctgaattttgcctttactttagaaacctgattcaacttaaccgaactctcaggaatctgattcctaagctgagtatcacattttagattacttactaatttgtgcatctatccacctagcaaatat

SEQ ID NO: 257 - DNA, 532 bp, Homo sapiens
  misc_feature (97)..(97): n is a, c, g, t or u
  misc_feature (152)..(152): n is a, c, g, t or u
taaaaccaaccagctgaacctttcaggctacaagagaacccgggtcggtaatgtctttttaagaataatttttaattgcttataacaagcatatttngtggcatttgaactatatttactgctccaatatccgttattttccaaaggatttngtatctttttgaaaatgtttacatcatcagatgatccacagaattcactttatgtgagatctcccgagagtttccatcccaacataatggactttggtttgaacacaattcgttttttcatttgaattggcatttcccaatatttgctaaacatttgctggagaaatcatttttcttttttcttttttagaaaactcagaatgaaaattcattcccctgaaatatttaggtgtctatattctatattttgatctattaagggattagtatttttccatgtttattgtgttatcagagtgcattagaaagattagtgattcatcttcacagcacatttttaatcaagcagttatttcaaccagcacattcgttttgttcat

SEQ ID NO: 258 - DNA, 489 bp, Homo sapiens
  misc_feature (363)..(363): n is a, c, g, t or u
  misc_feature (441)..(441): n is a, c, g, t or u
atcaccccctgttcattatgtcaggcctcatgggagcctggccttctccagaagctggccccggcgtcctcccaagctggaccacgtaggccccagatcacacctgggggtccagatgtaggggtcccgtgtgcacgcccaatcagaccgagcacttgtgacactaccccaacacctctcccagggctgaatgaggaacgcgccactggacacatgaggaagaggctgccctgggagctactgatgctgtgacctcacctctctggctttgggcggcaggtccctgcacctaggatgcctgcctggaaatgtccttgcattcgtggcctccttcacagcctcctcctcagagaagcctctgcnagtgcacagggagtgtgtgcagccttgtgaagggctgggaccacttgcccagactggggcccctcaggcacaggcgtngggtcctactgacctgtctccccagctcccacacagaaagcatctaaa

SEQ ID NO: 259 - DNA, 468 bp, Homo sapiens
cagaaggaaacggtgtctctcggctgtggctctgagtgcaaattgcatgggcggaaaggcgggggtggctgctcttcctggcaggcctgggccatcagcgaactgggccccgtgaggagggcgggagtgtggaggagggtgggcctctcacccaggctttctcggcccctctcctcagcttgcagagctggccagccccctccttagggggtgggcgaggagcctctgggcagacccaagaaccatggggactggggtgggttggtggcaccaatggcagccctccccgcccctctccttcaaggagggttcccgcagctggggggtgtgcggaggcgcatggcctcccgccacggggccgtgctgtgtttatggctggcagaggcagccagcgggtgggggattctgctgctcgctcacctgcctggctcgctggtctctcgaattttcttccctctgaaatcctat

SEQ ID NO: 260 - DNA, 531 bp, Homo sapiens
ctgcaccaactcatgctggactgttggcagaaggaccgcaaccaccggcccaagttcggccaaattgtcaacacgctagacaagatgatccgcaatcccaacagcctcaaagccatggcgcccctctcctctggcatcaacctgccgctgctggaccgcacgatccccgactacaccagctttaacacggtggacgagtggctgaaggccatcaagatggggcagtacaaggagagcttcgccaatgccggcttcacctcctttgacgtcgtgtctcagatgatgatggaggacattctccgggttggggtcactttggctggccaccagaaaaaaatcctgaacagtatccaggtgatgcgggcgcagatgaaccagattcagtctgtggaggtttgacattcacctgcctcggctcacctcttcctccaagccccgccccctctgccccacgtgccggccctcctggtgctctatccactgcagggccagccactcgccaggaggccacgggcacgggaagaaccaagc

SEQ ID NO: 261 - DNA, 379 bp, Homo sapiens
  misc_feature (210)..(210): n is a, c, g, t or u
  misc_feature (331)..(331): n is a, c, g, t or u
cctcggacaccagagacaataactgagcgcggaggacacgcctgccctgcctgccatctgtggcccgaagccattgccatccactgcagacgcctggagagggacaggccgcttccgagtgcagtcctggcgcagcaccgactcccacgcacccggggaaggacaccctcactcccacaccccgggaagaacactagaacatcagcagangggccctgcccctccgcctgcagccgtgaaaggaagctgggtcatcagcccagccccgcccaccccagcccctatgtgtgtttccctcaataaggagatgccttgttcttttcaccatgcnaataacatgcccagcaaaaacttgctttatgggtctgcctggagaaaa

SEQ ID NO: 262 - DNA, 486 bp, Homo sapiens
aaccacaccagaagacatcctcaggaacaaaggctgctccagctctaccagtgtcctcctcacccttgacaacaacgtggtgaatggttccagccctgccatccgcactaactacattggccacaagacaaaggacttgcaagccatctgcggcatctcctgtgatgagctgtccagcatggtcctggaactcaggggcctgcgcaccattgtgaccacgctgcaggacagcatccgcaaagtgactgaagagaacaaagagttggccaatgagctgaggcggcctcccctatgctatcacaacggagttcagtacagaaataacgaggaatggactgttgatagctgcactgagtgtcactgtcagaactcagttaccatctgcaaaaaggtgtcctgccccatcatgccctgctccaatgccacagttcctgatggagaatgctgtcctcgctgttggcccagcgactctgcggacgatggctg

SEQ ID NO: 263 - DNA, 350 bp, Homo sapiens
tctccgtggaggctatggcttcagacaggccccgaaggtctgtcaccaatgtgctcggttgtgggtcacataacgctctctggagggcttgcctttcagcttgggatcatgaaaagatgatttgacgctgtttctcatggtctccgacctaataaagcaagataagagaaaacaaatgttattttaaaaaaatcaccctttggcaaaagaaacatgtaaaattagaatctggcacaaacaaaacctgaatctgggttgtgaactttcaccacccgccgcaactctttgataaaacctcaagtgatatctattaccattgtaaaaataaagcctgcccctatgcttagaat

SEQ ID NO: 264 - DNA, 507 bp, Homo sapiens
ggcaaccggggaagtattgtggccttggagtttgctaaatccaaatatgaaaatcaaaagctttagtattcctcatcttctcttctggaagatttgcgttagagtttttgttgggccttcaaaaagctgtgttcagagttaggagaatatatccaataaaagatggtttcgtctaccaattggggaagtttcaccctctccctatctgaagaaaaaaatcaaaaacaaatgtccccggatctttcgatgcaagtcctggaggcagggagatcactgcctgcctggcccacgctgctgggacggctcgtcctccctgctttttgtttttcaaacctcctgcttctcccaccttgggaaggagaaatgtgaaacccggcagcggccgacctaggcggtcttgtggcccggagccggcccggcccgaaaaccatagacctggttgtactgtagcttgttgtttgggggaccaaattttctagagagaactagagcacttttgttgtgttt

SEQ ID NO: 265 - DNA, 192 bp, Homo sapiens
cacaggccttcagaggcgatggctgggcgacagtgacgaaagcaaagcaaagcagggctgtggagacactcctcgcatttgtctcttccctccaaggattatctgagcaagtcgacttgttcattcaaaggcggggtctgccaagccctgctctatccaatggggatagcttctacgtaacggattccaatt

SEQ ID NO: 266 - DNA, 202 bp, Homo sapiens
agagcaacagctctatatctggatcactgcagtgcctagaagatacaacagcacaatttacaaatccaaatttccaggaagtctctgcacatacctctagtacaaaagatgtttcagagactagagggtcagaaggcaaagagaggcaatattcaactcccagttcaggtcaaaagggaagaaagcctggtgttgaaagaaa

SEQ ID NO: 267 - DNA, 278 bp, Homo sapiens
gaaccacgttctttgtatgggcccaatgagctgtcaagctgccctgtgttcatttcatttggaattgccccctctggttcctctgtatactactgcttcatctctaaagacagctcatcctcctccttcacccctgaatttccagagcacttcatctgctccttcatcacaagtccagttttctgccactagtctgaatttcatgagaagatgccgatttggttcctgtgggtcctcagcactattcagtacagtgcttgatgcacagcaggcactca

SEQ ID NO: 268 - DNA, 392 bp, Homo sapiens
  misc_feature (302)..(302): n is a, c, g, t or u
ctcctggcctgatactctagggatgcaggtgggagaagcaggggtcctgggggctgcctggagctctgggaggcattctgaacggggtctactactgatctcaggtgagctctgccctcctctgaaagtcacttttctcatcagttaaatgggggcaagggtccgtggtccgaccaaggtcttggcttcacagacatcaccaggagcctgcatgcccctgatcactccttctccttcctccaggaaactccagcctggcctctgaccccagttcaatccgaccatgcccaagcccaagcggncctttcctccagaactgctccggggcctggctgtgtgactggagcaaggtgctaaacctctctgtgcctcgctggtctaatctgtaaaat

SEQ ID NO: 269 - DNA, 417 bp, Homo sapiens
  misc_feature (240)..(240): n is a, c, g, t or u
taatctcatccaaaaccatgctcacagacacacccagcataatgtttgaccaagtatctgggcaccttgtggttcagtcaaattaacacatattaactaccttagcaagatgaaaagcagtgaatgcaggatggtggttgaaattttaaatacgttggttatatagtctcattgaaaaaggaacatttgagtgaagacttgaaggggtggtggaataaaccatttatttgcttattgccngtctccctctatcagaatgaaagcttcatgaagcgagagacttaatttttatctgttatatccctagtgcctggtgcagggtaagtactcaaaaatatttgttgagtgaataagtaatgattgaggatggggactggtttgtatctggttatatctcttgtccttagcacagtacct

SEQ ID NO: 270 - DNA, 412 bp, Homo sapiens
ggggccctagggattatagccaggactctaatctgcctaccatgccatttaacaagagatcccactctccagctgccttgtgtccctagggtcctggccatgtgtttagtgtgctaaactttctcctttgttctcaggccttccaggtagtccccttcctggacttaagagtgcaaactcttctctgtggttctagccttgggcagaattatatcccagagaccacagagcaactgtcaagctgcttaccccctcacccagggctacagcctgtgcccagccctctaatttgtgcctctcttgtgttgggggtggtgggggttattcctttccctttcctgctctggcctccttgaaagttcagagtacccagtacaagtcagccaccatgctgacgggtatttttcctcat

SEQ ID NO: 271 - DNA, 372 bp, Homo sapiens
  misc_feature (76)..(76): n is a, c, g, t or u
  misc_feature (270)..(270): n is a, c, g, t or u
  misc_feature (347)..(347): n is a, c, g, t or u
tagccaggtatagtggcaggaacctgtaatcccagctacaggggaggctgaggcaggagaatcgcttgaacccggnaggtgtaggttgcagtgagccgagattgcaccactgcactccagcctgggcgacagagcgagactctgtctcgaaaaaaaaaaaggtccgtgccaagctgctccctgcccttgccctttccctttccctggggtccaaaccacatgtgtcctgcctctcctggccctaccacattctggtgctgtcctcactcncccctggcccagaggctcctgaagatgctgggcggtcctggcacagggaggagcagctctgtaaatctgtgcacatngccactcttggcctaataaaggagg

SEQ ID NO: 272 - DNA, 427 bp, Homo sapiens
cctaccaccgtcttcgagaggatgtcatgcggctctctcgcctagcactgggctcagaggcctggcgccgagtctggagccgcagtctgcagctggcgagttggccaaaccggggaggggcacctggagctccccagggtgaccctatgagggtattctcagttaggacccggagacaggacactcttcctgaagcggggcgcagatcagaggcagaagaggaggaggccaggaccatcagagtgacacctgtcaggggccgagagaggctcaatgaggaggagcctccaggtgggcaagacccttggaaattgctgaaggagcaagaggagcggaagaagtgtgtcatctgccaggaccagagcaagacagtgttgctcctgccctgccggcatctgtgcctgtgccaggcctgcactgaaatcct

SEQ ID NO: 273 - DNA, 526 bp, Homo sapiens
gtccacattcctgcaagcattgattgagacatttgcacaatctaaaatgtaagcaaagtagtcattaaaaatacaccctctacttgggctttatactgcatacaaatttactcatgagccttcctttgaggaaggatgtggatctccaaataaagatttagtgtttattttgagctctgcatcttaacaagatgatctgaacacctctcctttgtatcaataaatagccctgttattctgaagtgagaggaccaagtatagtaaaatgctgacatctaaaactaaataaatagaaaacaccaggccagaactatagtcatactcacacaaagggagaaatttaaactcgaaccaagcaaaaggcttcacggaaatagcatggaaaaacaatgcttccagtggccacttcctaaggaggaacaaccccgtctgatctcagaattggcaccacgtgagcttgctaagtgataatatctgtttctactacggatttaggcaacaggacctgtacattgtcacattgcat

SEQ ID NO: 274 - DNA, 429 bp, Homo sapiens
tgtgtccactggtttcagtctgagttctctgcactttgaggatgcagacagtgaagttctcccatggttatagggggagagatcataggaatgctatggaaagaggcctgaagtcagagccagctagtggttattatttattaattgcctgtgaggtgccaggcgcacatattagaccatatgtgattgcagtgagccacccggatccccttcaagctgctgctgcagctgatggaagtcctattggcagacagccttctctcatcagccccttcaggacttgcctcagttgcagagagctgccttccccaagatcacacccttccctggggactcacaaccaatggctgatccagaagaatccataaagcccgtatcatttcagcccaatttaggacagctttgttgagccattagacctacatgcag

SEQ ID NO: 275 - DNA, 434 bp, Homo sapiens
  misc_feature (376)..(390): n is a, c, g, t or u
gaagctctacttgcctggtggtaattccaggatgacccaggagaggctggaaagagcgttcaaacggcagggcagccagcccgcacctgtcaggaaaaatcagttgctgccgtctgacaaggtggatggtgagctgggtgccctgcggctcgaggatgtggaggatgagttgataagggaagaggtcatcctgtcgccagtcccatcagtgctcaagttgcagacagcatcaaaaccaattgacctctcagtagcaaaggaaataaagacccttctgtttggttccagcttttgctgtttcaatgaagaatggaaacttcagagtttttcctttagtaacacagcctcattaaaatacggcatagtgcagaacaannnnnnnnnnnnnnnagtcctggcagctgtccaaggctgtgtcctacagaaactcctgt

SEQ ID NO: 276 - DNA, 189 bp, Homo sapiens
aaaatcactgccactgacttttaccctcttcaggaagaggccaaggaggaggaacgcctcatagctttgaagaaaatcctcagctcgggggtgttctatttctcatggccaaacgatgggtctcgctttgacctgactgtccgcacgcagaagcagggggatgacagctctgaatgggggaactccttc

SEQ ID NO: 277 - DNA, 542 bp, Homo sapiens
gaggagcaggcaaggctacgtgggcagctgaaggagcaaagcgtgcgctgccggcgcctcgctcacctgctggcctcggcccagaaggagcctgaggcagcagccccagccccagggaccgggggtgattctgtgtgtggggagacccaccgggccctgcagggggccatggagaagctgcagagccgctttatggagctcatgcaggagaaggcagacctgaaggagaggccagggagggttctccccgtgacaaccccactgcacagcagatcatgcagctgcttcgtgagatgcagaacccccgggagcgcccaggcttgggcagcaacccctgcattccttttttttaccgggctgacgagaatgatgaggtgaagatcactgtcatctaaaagccggctactgtcagcaaagcctgaagaagtggggctggataccctgcccccaccatatccctaccatcccttctcagtcaaccctttacccttacagtagcaagcatagacccctgtctaacgggggtagacaggtgcagatga

SEQ ID NO: 278 - DNA, 475 bp, Homo sapiens
gacagtctaccgtcacgagaagcgggtgaaactgcagatctgggacacagctgggcaggagcggtaccggaccatcacaacagcctattaccgtggggccatgggcttcattctgatgtatgacatcaccaatgaagagtccttcaatgctgtccaagactgggctactcagatcaagacctactcctgggacaatgcacaagttattctggtggggaacaagtgtgacatggaggaagagagggttgttcccactgagaagggccagctccttgcagagcagcttgggtttgatttctttgaagccagtgcaaaggagaacatcagtgtaaggcaggcctttgagcgcctggtggatgccatttgtgacaagatgtctgattcgctggacacagacccgtcgatgctgggctcctccaagaacacgcgtctctcggacaccccaccgctgctgcagcagaactgctcatgctag

SEQ ID NO: 279 - DNA, 294 bp, Homo sapiens
  misc_feature (225)..(228): n is a, c, g, t or u
  misc_feature (231)..(231): n is a, c, g, t or u
ttttttagatctaccctcttgttgcccagggggagtccagtggcgtgatcttggctcactgcaaccgccgcctcccgggttcaagcaattctcctgcctcagtctcccgagtgtcttctgtcttttgtaaaagtttttcatgcccaagtgagattaattgtttaaaaaaaaaaaaacaagaagaaaacaacatagatttaccgcaagacctattgatatattatnnnncanggtggtatacccagggtgggtgtgacacagaccaaaagaggctgtgtgttctgttgttgataa

SEQ ID NO: 280 - DNA, 421 bp, Homo sapiens
  misc_feature (129)..(129): n is a, c, g, t or u
  misc_feature (136)..(137): n is a, c, g, t or u
  misc_feature (146)..(146): n is a, c, g, t or u
  misc_feature (323)..(323): n is a, c, g, t or u
ggaagcgtgtctgctgggagtttgcgaccgatgactatgacattggctttggagtttattttgactggacccctgtaactagcactgacataactgtgcaggtcagtgattccagtgacgatgaggatnaagaagnnaggaagagnaggaagagattgaagaacccgttccagctggagatgtggagagaggctccaggagctccttgcggggtcgctatggggaggtcatgcctgtgtaccggcgggacagccaccgagacgtgcaggctggcagccatgactaccctggtgagggcatctacctgctcaagttcgacaacncctactccctgctgcgcaacaagactctctacttccacatctactacaccagctgaaggactgctgtgacaggggcaggctgtatttgctggctgaag

SEQ ID NO: 281 - DNA, 544 bp, Homo sapiens
atgagaacggcgtcttcatgtgcgccgagggcaccggcaagttctgtcccctgaggtccttcccagacactgtctacaagaagctggtccagagagagaagactttaaaggttagaggagtggaccgcactccctacctgggggatgtcgctgttgtcgtgcaccctgggaaaaaagagatgggaaccccactcgcagacactcctacccggcccgtcacccggcatgggggcatgagggaccttcacgaatccagcttcagcctctctggctctcagatcgatgaccatgttccaaagcgagcttcagctcggatcctcgctcctcccggaggcaggtcgagtggcatttggtaaaggcattgccaagccccccgagtgaggacgcaccgccgccaccagcccgcaactctccagccgaagctgcaggggcaggagaggctgggctgggtggcacaccacccgaggggggccccgggacccacggagccctccctatgtctgcaaagtgattcactgtgcttcgagccaactctaacaggcac

SEQ ID NO: 282 - DNA, 430 bp, Homo sapiens
ctgattctacttctgcagggttccacagaagtctccagtcttcaaatcttcagtgtatgaaagcacagattcctgaaagaatggcctcaaatgaccaggagtaggagctctctatatccctgctcctgaaaaacaagctaactggagtctccatcacctgccaccagctatacacactaccaactacccaactgaactccatgactgatttgccagctaatcatgcccctgacccagcccacatggacatgggaaggacatcagtgaactgtgaaaagaggcagagactcactcccgtttgtattatgaaaacacacgccaataggacataaaaagaagcaagagtactgggctttaccatgagttcaaatctcatttctggcaattcctatgtctaaaaaaagcttcgtaatctcttttgagccctcac

SEQ ID NO: 283 - DNA, 219 bp, Homo sapiens
ccagaggatgatagcacctgtcagtgccaggcgtgcgggcctcaccaagccgcgggtccagatcttggttcctctaatgatggctgccctcagctgttccaggagcggtcagtcatagtggagaactcctcaggctctaccagcgcttctgagctcctcaaacccatgaagaagaggaagcgcagggaataccagagcccatcagaggaggagtcggag

SEQ ID NO: 284 - DNA, 232 bp, Homo sapiens
tttgcctgaggttgactatacatacaaatattgagcatttcctcctggtctccgtgataaacaaaggttttgatattgttcggcgagatggaaagaaaatatcaaggagtgagctgaagccactgcccttgagaaccctctcgaggagtctggcctcatgaagatgccagaataaacggcagatatatcctgaatgaatgtgagatttttaccctgtgaatttcctgtgagg

SEQ ID NO: 285 - DNA, 249 bp, Homo sapiens
  misc_feature (208)..(208): n is a, c, g, t or u
agtgcttccagtggcccaaaaatgctttttgaagtgtgttttgaaacagcccccaccaacatacaccccaccaggagtactgatcctgcctcccttcatgtctaggggaagcattcgcctttgagcacttgtttgcaaatctggggagtttgagacctcctagcatctcttcccttctttccctgcagtctattcactcccgcagccnaaaaatctctggcgttcaggttagcagtttctgggttggtt

SEQ ID NO: 286 - DNA, 510 bp, Homo sapiens
  misc_feature (138)..(140): n is a, c, g, t or u
  misc_feature (142)..(143): n is a, c, g, t or u
  misc_feature (371)..(371): n is a, c, g, t or u
gggaattaccttttgtattgcttgaatttactgctgtctgtatgaactctttttcagataaatttttaagaaatcagataagtgaagtgaaagagagagatcaaagtgttgtggcagcacaaaggagagactgactannntnntgctggggaatctgaaagagtgctttggtggaggtaacatgagatcagggccttgaagggtgagtcaagtctgtcaaggagacaagagggagagaagagcttgccagaggcccagagaccagcgaggaggctgtggtgtcctggaatgagggcgagatacttggtgggactggtcaacacggcaatgaagagggatatggccgaggaaaatggagaggggcactgganctgtgccagcaaggactgggatgcgtggacttgatcctgtagataacgggaggaagaaaggcctggatgcagcgccatgtcatgagcacatctgatcatgacagctcacctatgggaggattctccctcaacatttttc

SEQ ID NO: 287 - DNA, 555 bp, Homo sapiens
  misc_feature (39)..(39): n is a, c, g, t or u
  misc_feature (89)..(89): n is a, c, g, t or u
  misc_feature (106)..(107): n is a, c, g, t or u
  misc_feature (272)..(274): n is a, c, g, t or u
aggatgtgacagtgactcggggcgaccaggctatgtttncttgcatcgtaaacttccagctgccaaaggaggagatcacctattcctgnaagttcgcaggaggagnnctccggactcaggacttgtcctatttccgagatatgccgcgggccgaaggatacctggcgcggatccggccggctcagctcacgcaccgcgggacgttctcctgcgtgatcaagcaagaccagcgccccctggcccggctctacttctttcttaacgtgacgggnnngcccccgcgggcggagacagagttgcaggcctcgttccgggaagtgctgcgctgggcgccgcgggatgccgagctgatcgagccctggaggcccagcctgggcgagctgctggccaggcccgaggctctgacgcccagcaatctgttcctgcttgcagtcctcggggccctcgcatcagcgagtgcgacagtgttggcgtggatgttctttcgatggtactgcagtggcaactaacaaaggtatctttcctccttccctatcctatttccatcctgaaaat

SEQ ID NO: 288 - DNA, 381 bp, Homo sapiens
atgtatccgctgtcaactacgaatttgaggatgaatacttcagtaataccagtgccctagccaaagatttcataagaagacttctggtcaaggatccaaagaagagaatgacaattcaagatagtttgcagcatccctggatcaagcctaaagatacacaacaggcacttagtagaaaagcatcagcagtaaacatggagaaattcaagaagtttgcagcccggaaaaaatggaaacaatccgttcgcttgatatcactgtgccaaagattatccaggtcattcctgtccagaagtaacatgagtgttgccagaagcgatgatactctggatgaggaagactcctttgtgatgaaagccatcatccatgccatcaacgatg

SEQ ID NO: 289 - DNA, 488 bp, Homo sapiens
cacgctcctggaacgtcagatcattattgaggcaaatgatcgccatctagaatcagcaggacagactgagatcttccgaaagcacccccgcaaagcctccatcctcaacatgccactagtgacaacacttttctactcctgcttctatcactacacagaggctgaggggacattcagcagtcccgtcaacctgaagaagacatttaagatcccagataaacagtatgtgctgacagccctggctgctcgtgccaagcttcgagcctggaatgatgtagatgccctattcaccacaaagaactggctgggctataccaagaagagagcacccattggcttccatcgggttgtcgaaattttgcacaagaacaatgcccctgtgcagatattacaggagtatgtcaatctggtggaagatgtggacacgaagttgaacttagccactaagttcaagtgccatgatgtcgtcattgatacctaccgggacc

SEQ ID NO: 290 - DNA, 306 bp, Homo sapiens
tttcatgacttctccttcacctaagcacctcaaaacagatgatagcacttcaggattgacgcgaagcatcttcaaatatttggagagctaacaccatcaaaggtgccaaaatctacattgagactgctttgagaagtttctagcactgaaagttggaattgacactccagccaatgatccttccttctttcataatcaatgcaataagattgcagacagaaattccagtgatttctactgcacagctctggacatctcttttcctagtattattccctgaattggccactgatttcaattctgcag

SEQ ID NO: 291 - DNA, 348 bp, Homo sapiens
ctcctgggtccgcagtgtactgcgagggagcacagatgtccatcccccgctggggtggagagcggcagcaggcctgatggatgagggatcgtggcttcccggcccagagacatgaggtgtccagggccaggccccccaccctcagttggggctgttccgggggtgactgtgagcgatcccaccccaaacctgagatggggtagcccgtcctgtgtcctccacagggacaagcagtgggaggagtctgaatggtcaccaggaagcccgggctccatcttgacctcctttttcagggacaggagcaacaggcccctcttccctgactctaagcccttccctgtaaggtga

SEQ ID NO: 292 - DNA, 395 bp, Homo sapiens
  misc_feature (343)..(343): n is a, c, g, t or u
  misc_feature (361)..(361): n is a, c, g, t or u
tctctgctttccctcttatgaaaatggcagatgcctttttgtgaaggtctcaaagcccacttcatcctggctgcagcaccaaaaggacaaaggcccgcttttgaagtgcctgataaggcattcctttcacccctccatgaggaaggtggcaaatcttgagactccctattagagagcttcgattttcctgaaattgtgttaggaaaatagggtgacttggtttgatcttggtttctatacctattatggctgcctgactctggtcatttggcccctgcaggcctaagccacttggttttgcttcacatattggggtttattagaacagtacgtagggaagcanatgccagaggcacccgtnccttttccctgccttctaggtgctcctgggaaat

SEQ ID NO: 293 - DNA, 557 bp, Homo sapiens
accaagatctctgcctggcacaataacgtggagaaaaccctgccctccaccaaggccacgcgggtgggcgtgcttctcaactgtgaccacggctttgtcatcttcttcgctgttgccgacaaggtccacctgatgtataagttcagggtggactttactgaggctttgtacccggctttctgggtattttctgctggtgccacactctccatctgctcccccaagtaggcaggctgtaggcacttgggctgactgcctgcagaagtcccaagaccctagtgaaaatacagcaggcagaactctccttggataattcccccaagaggtccccaaggattgggagcatgggaggggagctggcgggagggtgggaggtgggatttagccaggaaaggggtgagagtgattgtgttgtgggcgaggaggcgtttccaccccctggtgcctatcagggcagggtgacctactccccattgttctggaaatctccaggctgctgggcagctgggcagctgggcagagctctgggaagtgaagtcatgagtgcccgattcctc

SEQ ID NO: 294 - DNA, 547 bp, Homo sapiens
ggttcgggtgagggcactctatgactacgctggccaggaagctgatgagctgagcttccgagcaggggaggagctgctgaagatgagtgaggaggacgagcagggctggtgccaaggccagttgcagagtggccgcattggcctgtaccctgccaactacgtggagtgtgtgggcgcctgagtgtcctgacagcccttctgcaacgtttacccaccctggttcagagcccagcttctcctggagagccggaccctcagggccctgaaccgtcgctctctggctgctcctctgtcccttgagggaggaagtcctgggacccagggaggggaggggcctttgtctagggaagggactggtagggaagggacgagtctaggctgagggcaagatgggaggtcagaggtgacagaagcgttcaggggtgcctgggcctccccaggagctgtggactcagttcctgacctctgctttggggttcctggggtgggcttggggtgagtgtagttctggcctagcagcaccctcttgtggcttgttctagcgtgt

SEQ ID NO: 295 - DNA, 147 bp, Homo sapiens
tgtatgtgaccaaaggtaggtcctgggatgacagcaatgctgacactggcctaaggagttactcatccatttaataagtattccagcagatacagatgtgaacagtcaagtctctgccatccacaatgcttgtgttctaatgcaaga

SEQ ID NO: 296 - DNA, 83 bp, Homo sapiens
atgtgttcaaccaagcgggaaactctccgggtagagtgaaatccgaagttgctatgctacaagataacctgggccgtgcgccg

SEQ ID NO: 297 - DNA, 545 bp, Homo sapiens
gtctttctgagagtttcattgccattatcaacaagagaagttgaaatttacaagtcaggaggttatttttccagattgataaccatagaaagtgaataaacacttttaaggtcgcaaacatttgctaggttgtccttctcaatgcatgtgcaggctgcatcctgtccttgtttttaagccagggtttataaataagtagatttataccaatcttaatagaattgtatattttatgcaagaattaaatgctttacaacatgaagtataactcaacccattgtaaactttggtggcaatatggatttgaaactcgacagttctcttgtatttgcttcctaggtttctgcatgcaagttatgacaggtaggactgaaaaaacactgccttttgacttctagcatttagcaaccgagagtcgtagagtcaataaagctgtaagtgtcttcacttaatctgtggttctcctaaaactattatctgaaacctacagcatcccaccatgaaatatttggtaaatttatgttgtgacgtgttgcagcatgtaa

SEQ ID NO: 298 - DNA, 485 bp, Homo sapiens
aatttgtctgtgacccagatgccctcttctccatggctttcccggataaccagcgtccgttcctgaaggcagagtccgagtgccacctcagcgaggaggacaccctgccgctgacccactttgaagacagccccgcttacctcctggacatggaccgctgcagcagcctcccctatgccgaaggctttgcttactaagtttctgagtggcggagtggccaaaccctagagctagcagttcccattcaggcaaacaagggcagtggttttgtttgtgtttttggttgttcctaaagcttgccctttgagtattatctggagaacccaagctgtctctggattggcacccttaaagacagatacattggctggggagtgggaacagggaggggcagaaaaccaccaaaaggccagtgcctcaactcttgattctgatgaggtttctgggaagagatcaaaatggagtctccttaccatggacaatac

SEQ ID NO: 299 - DNA, 409 bp, Homo sapiens
  misc_feature (36)..(36): n is a, c, g, t or u
  misc_feature (38)..(38): n is a, c, g, t or u
  misc_feature (40)..(40): n is a, c, g, t or u
  misc_feature (312)..(312): n is a, c, g, t or u
acagcttagcgatggagaaaatggcatccctgttgntntntcaccagataaattgcctggatctctgggacacccccgtccccaggagaaggatgtttgggaagagatggatgccaacaaaaacaagataaagcttggaatttgtaaggctgctactgaagaggagaacagccatggccaggcaaatggtcttctcaatgctccaagccttgggtcaccaattcgtgtccgctcagagattactcagccagacagagatattccactggtgcgaaagttacgttccattcacagctttgagctggaaaaacntctgaccctggagccaaagccagacactgacaagttccttgagacctggtataaaatagtgtatttttctttttaaagcttctaaggtaccattatt

SEQ ID NO: 300 - DNA, 430 bp, Homo sapiens
  misc_feature (150)..(150): n is a, c, g, t or u
  misc_feature (164)..(164): n is a, c, g, t or u
  misc_feature (170)..(170): n is a, c, g, t or u
  misc_feature (173)..(174): n is a, c, g, t or u
  misc_feature (185)..(185): n is a, c, g, t or u
  misc_feature (187)..(187): n is a, c, g, t or u
  misc_feature (207)..(207): n is a, c, g, t or u
  misc_feature (210)..(210): n is a, c, g, t or u
  misc_feature (220)..(220): n is a, c, g, t or u
  misc_feature (390)..(390): n is a, c, g, t or u
  misc_feature (393)..(393): n is a, c, g, t or u
  misc_feature (395)..(398): n is a, c, g, t or u
  misc_feature (400)..(400): n is a, c, g, t or u
  misc_feature (403)..(403): n is a, c, g, t or u
gagggccaagagctagggacagggggaagagactggcccaggtggtagggaggaaagaactcccagagtttcctttagccaggaaacctgctctactgaccccgtgacttggacagtcagacatcaccctgagagtgacaagtgtaaaantgactcccttcctnccccgnccnncggaagtatantnagatacttgaaagcagtccnttnctaaaatggncttacctatgtggcctgaacgattaaaagaaagaactcagagttacaagggaaaaagaaaaagagttacaagggaattgtagtctttttctgaatagaatattagtactgtggtattgcatttcatgggaatggaaatgtattggtaaagctacctgatggaagctttcnctngnnnncnaanatggagggtgtattatgtgcagttatt

SEQ ID NO: 301 - DNA, 536 bp, Homo sapiens
  misc_feature (68)..(69): n is a, c, g, t or u
  misc_feature (72)..(72): n is a, c, g, t or u
  misc_feature (74)..(76): n is a, c, g, t or u
  misc_feature (78)..(82): n is a, c, g, t or u
  misc_feature (100)..(100): n is a, c, g, t or u
  misc_feature (121)..(121): n is a, c, g, t or u
  misc_feature (129)..(129): n is a, c, g, t or u
  misc_feature (134)..(134): n is a, c, g, t or u
  misc_feature (168)..(168): n is a, c, g, t or u
  misc_feature (216)..(216): n is a, c, g, t or u
  misc_feature (228)..(228): n is a, c, g, t or u
  misc_feature (254)..(254): n is a, c, g, t or u
  misc_feature (276)..(276): n is a, c, g, t or u
atcgaagaacaaagagtgctccaaaaaataggtcattcttttattttcataaagtatctaaactgtannaanannnannnnngtgtttcattctaaattngcagctgaaataaatttattngcgatagnagaantatcttattattcatcctcagaaataaaggattngaagggatagagattatatgataaatttatagaagactttcagaattntgaatgcatttngtttagtgttatgaaatgacaatagnaaaaaagtctcgacttcaattnaaaagttacacaaacaaacaaatctacaggcatgtctttatataccatcaggtctaagttttcaaagaaaatggtagatataactgcagataactcattacagtcataatctctgcccatgtgtattgagagggggcagttgtgcacgaaaaaagaatttatgtggccattttaataaattcagtttaaaatagacttgtgtatatgcatgaatcatcagagatgaaactggtttgagagactcatgtgaaccttacgaa

SEQ ID NO: 302 - DNA, 371 bp, Homo sapiens
ctggtacgctgctgctgcagttaccagaaaaactcataagcaaatacaactggatcaagcaatggaaacttggactgaaatttgatgggaagaatgaggacctggttgataaaattaaagagtcccttactctgctgaggaagaaggtttggaacctgtagtgtcctgtctgataagggtgaagctctcgttcttgcttgccccagaagaccagtttttagtcttcactcagtggattttcaaatgctcttggctgatttttaggcaaaatggttttaaatgaattcaaactcttcccacgagggctttagtaaaatgggaagtaccaacattatatattcttagagcagatgccatgtactagggtatca

SEQ ID NO: 303 - DNA, 355 bp, Homo sapiens
  misc_feature (223)..(223): n is a, c, g, t or u
  misc_feature (227)..(227): n is a, c, g, t or u
gaagctgtgtggagtggaagatggacattgaggaagaagggcaggtgtggtctcacccagaatggttcctgctgcttccgcggtgcccaggcttttctcacggcctctgctgggttctcccctgggtgctgtggatgcatcctgcctgctggaaattctgtgctctctgtttccatccctttgtcgtggtaatgaccgtatacctctcccctgtaccctcctntgcntgctctccgtgcaggcccctctccctctggttgtcccatcagcatttccccacagctcgttgttcctccttcctcttttctggtgacctttctactgattgcattgtacctctttccctgatattaaa

SEQ ID NO: 304 - DNA, 362 bp, Homo sapiens
gcctgtgtcttcgggctgaatttgatctggccatcccagggggtctcctccctgagtgcccttgtgcccctgaacatgttcactgaactgctgatcgagtactatgaaaagatcttcagcaccccggaggcacctggggagcacggcctggcaccatgggaacaggggagcagggcagcccctttgcaggaggctgtgccacggacacaagccacgggcctcaccaagcctaccctacctccgagtcccctgatggcagccagaagacgtctctagtgttgcgaacactctgtatgtttcgagctacctcccacacctgtctgtgcacttgtatgttttgtaaacttggcatctgtaaaaat

SEQ ID NO: 305 - DNA, 533 bp, Homo sapiens
cgaagagcaagacccactctgttccagaagccctataagctggaggtggacaactcgatgtaaatttcatgggaaaacccttgtacctgacatgtgagccactcagaactcaccaaaatgttcgacaccataacaacagctactcaaactgtaaaccaggataagaagttgatgacttcacactgtggacagtttttccaaagatgtcagaacaagactccccatcatgataaggctcccacccctcttaactgtccttgctcatgcctgcctctttcacttggcaggataatgcagtcattagaatttcacatgtagtagcttctgagggtaacaacagagtgtcagatatgtcatctcaacctcaaacttttacgtaacatctcaggggaaatgtggctctctccatcttgcatacagggctcccaatagaaatgaacacagagatattgcctgtgtgtttgcagagaagatggtttctataaagagtaggaaagctgaaattatagtagagtctcctttaaatgcacatt

SEQ ID NO: 306 - DNA, 434 bp, Homo sapiens
  misc_feature (131)..(131): n is a, c, g, t or u
  misc_feature (191)..(191): n is a, c, g, t or u
  misc_feature (205)..(205): n is a, c, g, t or u
ggaaccctcctcttggcaagggctttccgaagttaacctgaaaaactggttcaggccatgacagcaaagggttggatagcctcattatccctcctcccttcagaactctggaacagccagcgttaacatcnacacaggccttcagtctgatgagaaacatttaccatctattgtctcggaagcctgctacntggaggcttcatcntgatgataaagccttggtctccacaaccccgtataacccagacattcctttctattgataactcttgcaagcgattgccaaccagaagatgtttaaatccacctataacctggaagcccccagttccagctgcccacctttctggactaaaccaatgtatatcttcaatatatttgattgatgtctcatgtctccctaaaatgggtaccatcaagctgtgcactgacca

SEQ ID NO: 307 - DNA, 157 bp, Homo sapiens
cctccgcacactggatgagaatccatcttccattcgagctgggaatagactttgtgaaagatattatgtaatggagtctcgggaaccctgagacctctccagcgaagctgaagtgaattaattaagtgctttaaacggtcttggtgctgtgttacgg

SEQ ID NO: 308 - DNA, 367 bp, Homo sapiens
  misc_feature (35)..(35): n is a, c, g, t or u
  misc_feature (38)..(40): n is a, c, g, t or u
  misc_feature (43)..(47): n is a, c, g, t or u
  misc_feature (52)..(53): n is a, c, g, t or u
  misc_feature (58)..(58): n is a, c, g, t or u
  misc_feature (60)..(60): n is a, c, g, t or u
  misc_feature (62)..(64): n is a, c, g, t or u
  misc_feature (67)..(68): n is a, c, g, t or u
  misc_feature (71)..(71): n is a, c, g, t or u
  misc_feature (73)..(73): n is a, c, g, t or u
  misc_feature (75)..(75): n is a, c, g, t or u
  misc_feature (79)..(79): n is a, c, g, t or u
  misc_feature (82)..(82): n is a, c, g, t or u
  misc_feature (84)..(86): n is a, c, g, t or u
  misc_feature (89)..(91): n is a, c, g, t or u
  misc_feature (93)..(93): n is a, c, g, t or u
  misc_feature (289)..(289): n is a, c, g, t or u
aggtgatgcactatgcccagtacgtcctcctggcnctnnnctnnnnngcgtnncctgntncnnntcnntgncntntgcnaantnnngannnanaaccgtgtaaaaccatttttatgtggcttcaacgtcaactataaattagcttggttatcttctaggagaaatgctatttattttggagtagtagtaaaaagggctcaaaggataaggaggccattcaggcctattctgaatccctgatgacatcagctcccaagggctctgtgctgcaggaagcaaaactgtaggngggtaccaggtaatgccgtgcgcctccccgccccctcccatatcaagtagaatgctggcggcttacagactgaagatg

SEQ ID NO: 309 - DNA, 484 bp, Homo sapiens
accccaccacgtaccagatggatgtgaaccccgagggcaaatacagctttggtgccacctgcgtgaagaagtgtccccgtaattatgtggtgacagatcacggctcgtgcgtccgagcctgtggggccgacagctatgagatggaggaagacggcgtccgcaagtgtaagaagtgcgaagggccttgccgcaaagtgtgtaacggaataggtattggtgaatttaaagactcactctccataaatgctacgaatattaaacacttcaaaaactgcacctccatcagtggcgatctccacatcctgccggtggcatttaggggtgactccttcacacatactccccctctggatccacaggaactggatattctgaaaaccgtaaaggaaatcacaggtttgagctgaattatcacatgaatataaatgggaaatcagtgttttagagagagaacttttcgacatatttcctgttcccttggaat

SEQ ID NO: 310 - DNA, 526 bp, Homo sapiens
ccatggggccatctgggccattcagagactggagtgagatttgggtgtggagggggaggcgccaaggtggaggagcttcccactccaggactgttgatgaaagggacagattgaggaggaagtgggctctgaggctgcagggctggaagtccttgcccacttcccactctcctgccccaatctatctagtacttcccaggcaaataggcccctttgaggctcctgagtgccctcagatggtcaaaacccagttttccctctgggagcctaaaccaggctgcatcggaggccaggacccggatcattcactgtgataccctgccctccagagggtgcgctcagagacacgggcaagcatgcctcttcccttccctggagagaaagtgtgtgatttctctcccacctccttccccccaccagacctttgctgggcctaaaggtcttggccatggggacgccctcagtctagggatctggccacagactccctcctgtgaaccaacacagacacccaagcagagcaatc

SEQ ID NO: 311 - DNA, 319 bp, Homo sapiens
  misc_feature (264)..(264): n is a, c, g, t or u
taaattgcctggatctctgggacacccccgtccccaggagaaggatgtttgggaagagatggatgccaacaaaaacaagataaagcttggaatttgtaaggctgctactgaagaggagaacagccatggccaggcaaatggtcttctcaatgctccaagccttgggtcaccaattcgtgtccgctcagagattactcagccagacagagatattccactggtgcgaaagttacgttccattcacagctttgagctggaaaaacntctgaccctggagccaaagccagacactgacaagttccttgagacctggtataaa

SEQ ID NO: 312 - DNA, 234 bp, Homo sapiens
  misc_feature (85)..(87): n is a, c, g, t or u
  misc_feature (89)..(90): n is a, c, g, t or u
  misc_feature (92)..(92): n is a, c, g, t or u
  misc_feature (94)..(95): n is a, c, g, t or u
  misc_feature (97)..(97): n is a, c, g, t or u
  misc_feature (186)..(186): n is a, c, g, t or u
gcgcttgcgcagtagctgaacgcgggcgtttctttcctccctttttttcgaattggttttgggggtagattcgagttacaaaatnnncnncngnngngtgttcggcgcggttcccccagctgtctctggctgaaccggcgctctcgcctccctgccgaacacagcgtgaggagcccccccaggganatggtgtttgagtctctgggcttgccgagcactaagtcctctgagttc

SEQ ID NO: 313 - DNA, 125 bp, Homo sapiens
gtactgcaaaaatcaccctcggcaagacgaatgtctgacgtgccggaaggagtcatacgggtccatgctccacttctctccaaggtgtccatggccattcaactcaacaatcaaaccaaagccaa

SEQ ID NO: 314 - DNA, 446 bp, Homo sapiens
  misc_feature (53)..(53): n is a, c, g, t or u
  misc_feature (93)..(93): n is a, c, g, t or u
  misc_feature (130)..(130): n is a, c, g, t or u
  misc_feature (205)..(205): n is a, c, g, t or u
  misc_feature (211)..(211): n is a, c, g, t or u
aagtcattcgtttaagcgtggattattttgccgaatgaataatgatgatggcngctttcatctcttatgaagttttcctggccaagagccagnagttggaagtttggatcattcttttttcttttttaancatttcttctcttctttctcttttttatcactaaatgaatgacatgtggagaaactattcagcttttaaagtatnctccanttacttgtctcaactaccactatttattgtgtttatcaaaatcataaaaagctcatttttggcatttaccttcgtggttgagactgctgtctgtatgtctgggaatggaagtcctcttcagggattcagcaagggctgtacttttgcttaatactagtggttccttattctaagtgatgacatcatccacctttcctagaaatgggtctttgtgcctagtatgatatctttccaa

SEQ ID NO: 315 - DNA, 473 bp, Homo sapiens
  misc_feature (207)..(207): n is a, c, g, t or u
  misc_feature (264)..(264): n is a, c, g, t or u
  misc_feature (375)..(375): n is a, c, g, t or u
  misc_feature (395)..(395): n is a, c, g, t or u
  misc_feature (405)..(405): n is a, c, g, t or u
tgtttcaggcccatccacagttgaagcagtgtgtgcgtcaggcaattgaacgggctgtccaggagctggtccatcctgtggtggatcgatcaattaagattgccatgactacttgtgagcaaatagtcaggaaggattttgccctggattcggaggaatctcgaatgcgaatagcagctcatcacatgatgcgtaacttgacagctnggaatggctatgattacatgcagggaacctttgctcatgagcatatctaccaacttnaaaaaacagttttgcctcagcccttcgtgtaagttggctatttccttggtataggtacaaaacgtattactgcttgtctgtaataatttttttctttgtctatatatggcnctgggcgttaccacttattnttaataatcnccatatttgtttgatgtcttccatcattttagattgtaattctgtgaggcaaagcatcatgtctgtgt

SEQ ID NO: 316 - DNA, 576 bp, Homo sapiens
  misc_feature (63)..(63): n is a, c, g, t or u
  misc_feature (351)..(352): n is a, c, g, t or u
  misc_feature (395)..(395): n is a, c, g, t or u
  misc_feature (496)..(496): n is a, c, g, t or u
aggacaccaggctggtggccacagtgctgctgtccgtggtcgtgctgctccacgccctcctgnccatgggctgtaagttgtacttcttccagtcgctgcctccggagaacgtggctcctccaccccaaatcacatctctgccctcaaacatcgcgctgtcccctaccttgccgcagtccctggccccctcctaggaaggcccgggtcccacaggcaacacctaagtggaccaacccctctgcctgtcctgccccccagacgatgactgaaggctcctttgacaccttgagatgattctgctactttccagacttttcttacaaagcaaacacttttattttctatgcaaanntgattcagagaatttatataaaggcgggcgaggggcagccgancagggagctttgggacagggctggggcccccatatcccccccgggccacctgctttccctcctatggctcccctggaacaggagggagagccaagggggcngcccagcctggacagcgcccgctcctgcctgggtgcacacacggcgggcctgagctccagcatctgagtttgggggtatg

SEQ ID NO: 317 - DNA, 265 bp, Homo sapiens
ccaggagcagctgcgtgacgtcatgttctacctggagacacagcagaagatcaaccatctgcctgccgagacccggcagaaatccaggagggacagatcaacatcgccatggcctcggcctcgagccctgcctcttcggggggcagtgggaagttgccctccaggaagggccgcagcaagaggggcaagtgaccttcagagcaacagacatccctgagactgttctccctgacactgtgagagtgtgctgggaccttcagctaaa

SEQ ID NO: 318 - DNA, 515 bp, Homo sapiens
  misc_feature (108)..(108): n is a, c, g, t or u
  misc_feature (115)..(115): n is a, c, g, t or u
  misc_feature (203)..(203): n is a, c, g, t or u
  misc_feature (241)..(241): n is a, c, g, t or u
atacgtgggtagtgttgcatttcaaatgaggctcttctggttgaaatgatatatttataagaccagaatatcacaaatgggtgatgtataatgtctctttagtttttnggtattnggcctcttttaaagcctgtcggatgtatgggagaaaacaatgaacgtgctttgatttcctatcagtcactcttaagaacatacatatngtttaagtaactcggtcttttttatctgattcttgagncactatgggtagcaagtaaccacttacaaatttaaatgtaatatacactccttttctgtgtgtcaagtccttatttttaggtgcatattgacatttaaatgttaattattgtttggcatataatatcaaaaatctattatttattttatgctgttacagttaaaagatgtgatttatgacatactgaatcaacttgccttccaatttagtgtgtaatatggtaagcatttatacttttagatatgtcttatttttatttggatgcctgtctacc

SEQ ID NO: 319 - DNA, 541 bp, Homo sapiens
  misc_feature (136)..(136): n is a, c, g, t or u
  misc_feature (141)..(141): n is a, c, g, t or u
  misc_feature (147)..(147): n is a, c, g, t or u
  misc_feature (159)..(159): n is a, c, g, t or u
  misc_feature (161)..(161): n is a, c, g, t or u
  misc_feature (167)..(167): n is a, c, g, t or u
  misc_feature (172)..(172): n is a, c, g, t or u
  misc_feature (181)..(181): n is a, c, g, t or u
  misc_feature (188)..(188): n is a, c, g, t or u
  misc_feature (191)..(191): n is a, c, g, t or u
  misc_feature (195)..(195): n is a, c, g, t or u
  misc_feature (220)..(220): n is a, c, g, t or u
  misc_feature (260)..(260): n is a, c, g, t or u
  misc_feature (509)..(509): n is a, c, g, t or u
gagttaatgcagcactcgtcattcagaaatattggcgaagagtcttagcacagagaaaattattaatgttaaaaaaggaaaagctggaaaaagttcaaaataaagcagcatcacttattcagggatattggagaanatatnccactngacaaagatttncngaaatngaaanattattcantcatccngcnaatntaggataagaatgataattgctgtnacatcttataaacgatatctttgggctacagttacaattncagaggcattggcgtgcttatttaagaagaaaacaagatcaacaaagatatgaaatgctaaaatcatcaactcttataatccaatctatgttcagaaaatggaagcaacgtaaaatgcaatcacaagtaaaagctacagtaatattgcaaagagcttttagagaatggcatttaagaaaacaagctaaagaagaaaattctgctattatcatacaatcatggtatagaatgcataaagaattacggaantatatttatattagatcttgtgttgttatcat

SEQ ID NO: 320 - DNA, 495 bp, Homo sapiens
  misc_feature (144)..(145): n is a, c, g, t or u
cttcggatttttattgactcaaaatagtgccattccccttaatgaaatagattttgagtctttttttcattgtaacccccaaatgagaatcatctacctgattcttgtaccaaaaaaaaatttttttcagtctttttttttttnnagagagggtctcttgtcaacgcaagactgggagtggcagtggcacgatcttagctcactacaacttctggcctcccaggctcaagcaattctcctgcctcagcctcctgagtagctggggattacaggcatgcaccaccacgcccagctaattttggtatttttagtagagacagggtttcaccattgtttggccaggctggtcccgaactcctgacctcaggtgatccacccacctcggcctcccaaagtgctgggattataggtgcgagccattgcgcccagcctcagttattttatttaacagtgtaagtacttagaaagtaagaaaatggcgtgattagttttttg

SEQ ID NO: 321 - DNA, 429 bp, Homo sapiens
ggctgaggaggctggtctgaacatcactcacatttgcctccctccagatagcagtgaagccgagattatagatgaaatcttaaagatcaatgaagataccagagtacatggccttgcccttcagatctctgagaacttgtttagcaacaaagtcctcaatgccttgaaaccagaaaaagatgtggatggagtaacagacataaacctggggaagctggtgcgaggggatgcccatgaatgttttgtttcacctgttgccaaagctgtaattgaacttcttgaaaaatcagtaggtgtcaacctagatggaaagaagattttggtagtgggggcccatgggtctttggaagctgctctacaatgcctgttccagagaaaagggtccatgacaatgagcatccagtggaaaacacgccagcttcaaagcaa

SEQ ID NO: 322 - DNA, 467 bp, Homo sapiens
tctgagggtgccttgatgctggctcatcacacattgagtatcttgggcattatcatggcccttgtgcttggggagtctggcacagaggtcaatgcagtcctctttggaagtgagcttaccaaccccttgctacagatgcgctggtttctccgggaaacagggcactatcacagtttcactggagatgtagtggacttcctctttgtggctctgttcacaggagtgaggattggtgtgggagcttgcctccttttctgtgaaatggtctcccccacgcctaagtggtttgtgaaggctgggggagtagcgatgtatgctgtgtcttggtgtttcatgtttagcatctggcgctttgcatggaggaagagcatcaagaagtaccatgcttggagaagcaggcggagtgaggaacggcagctgaaacacaacggacatctcaaaatacactagccaaggcttgctccaga

SEQ ID NO: 323 - DNA, 504 bp, Homo sapiens
ttggcacttcagaagtctccccaatcttgacaaagccctggagaaagggccgggcctcccgttgataagaatatcactgcagataaatggaggtttcaaattgaaagaaaggaggagggcctcctgttgataagattattgtcactgcaggtaaatggaggcttcaaatagaaatacatttcagttacagaaaaaaaaattatctttgttacacatttgagtttgcaggcctaaggttactcccgctacactatcatctgtaaccataacgcactcaacattttaagctaactataaggattgttgcttcactcaaagatcctgaggttttattcactaacatttttatttggtgactatagttgacaagaacaaagctgtggggaaccaacaaacactgcaatgcctggcattgtcacctcactagattgtgagttcctctgggacagggtccgtacattttcttagaatccctcacttagccattagcctgcacagtgcttg

SEQ ID NO: 324 - DNA, 163 bp, Homo sapiens
catggaggagtgcatttccttggctattccagaagtcctacctcccttctgagattttataatggtatttcttatggttatcccaaatatacttggcaagtcgtcttataaaccaccaataatagcctcttaaaaattcaaaaattactcctcttggctaaca

SEQ ID NO: 325 - DNA, 441 bp, Homo sapiens
cctccgcggaaggcgtggcagggaggcagtcgccctgcggtgcaagctgctgctccagagcataccgtggcccaggtggtatccccaaggcctcgtgccgtggctggggtcctgggaggtggtcgccctgcagtgcaagctgctgctccagagcgtaccgtggcccagactgatcctcgaggcctcctgccgtggctggggtcatggtcggctgcgcatgtccagaagcatttccttcctgcgaccatcccggcgcccctagggggagaagccaggacagcagcttccgctgtctccacagcagacacgggacggattccacagacgggagcctcattcgtaccatgccaaacgcattcactcggggcagtattaaccgttctagaaagccactgttttatagcaaaacaggaaaggaaaagctaccagttttttattcag

SEQ ID NO: 326 - DNA, 457 bp, Homo sapiens
tttcccctagttgacctgtctataagagaattatatatttctaactatataaccctaggaatttagacaacctgaaatttattcacatatatcaaagtgagaaaatgcctcaattcacatagatttcttctctttagtataattgacctactttggtagtggaatagtgaatacttactataatttgacttgaatatgtagctcatcctttacaccaactcctaattttaaataatttctactctgtcttaaatgagaagtacttggttttttttttcttaaatatgtatatgacatttaaatgtaacttattattttttttgagaccgagtcttgctctgttacccaggctggagtgcagtgggtgatcttggctcactgcaagctctgccctccccgggttcgcaccattctcctgcctcagcctcccaattagcttggcctacagtcatctgcc

SEQ ID NO: 327 - DNA, 438 bp, Homo sapiens
  misc_feature (65)..(65): n is a, c, g, t or u
  misc_feature (96)..(96): n is a, c, g, t or u
  misc_feature (112)..(112): n is a, c, g, t or u
  misc_feature (218)..(218): n is a, c, g, t or u
  misc_feature (229)..(229): n is a, c, g, t or u
ttgtcctttatgtatcttctttccatagtgcttactggagccttccaaaataatgtctcctcaangtgacagcccctcaggaatttgaaggcaatngtcacaccctcacccnctttcctgagttttttctggtttattaacgtcagtctttacagtcagtgctcattgacggtggttttctctggttgtttcctgaacacgtagtgctcttaaagcantgccctgaggngaatacaattctccaggggcattctgattggcaggtgaagcacagtgccatgttcccagcactgatttgggaagtggcttgtcacatcccacagtgaactcagtcaactggaatgcctaactctctttcataagacctcctgctacattatgtttctcccagactgtactcaggtccaagaacagaatttactagtctatccttctcaa

SEQ ID NO: 328 - DNA, 535 bp, Homo sapiens
  misc_feature (40)..(40): n is a, c, g, t or u
cccttcttgctgccacaggatgaataaagtgttgagattngtctatggagaaagctgtgtgtctgtttttatctcccctctcaggaccagtcagccactggtcaatcaggctgatcatggaacattaggaattctccaattaagggagaaaaagtccagggacttagttatatcttcagaccagtgcagctgggacacacaaagttctcctgtctcaccatctgatatggtttggatgctcgtcccctccaaatctcatgttgaaatgtaattcccagtgttggaagtggagcctggtgggaagtatttggatcatgagagaggatccttcatgaatggctcagcaccatctccttggtgatgagtgagttctcactcaattcacatagatatggttgtttaaaagagtctgagacctctcccctctttctcgccatgtgatatgcctgctcccccttcaccttccgcctttactgtaagcttcctgaggccctcaccagaagctgagcaaatgttggtgccatgccagtacagc

SEQ ID NO: 329 - DNA, 432 bp, Homo sapiens
gccacagactgaactcgcagggagtgcagcaggaaggaacaaagacaggcaaacggcaacgtagcctgggctcactgtgctggggcatggcgggatcctccacagagaggaggggaccaattctggacagacagatgttgggaggatacagaggagatgccacttctcactcaccactaccagccagcctccagaaggccccagagagaccctgcaagaccacggagggagccgacacttgaatgtagtaataggcagggggccctgccaccccatccagccagaccccagctgaaccatgcgtcaggggcctagaggtggagttcttagctatccttggctttctgtgccagcctggctctgcccctcccccatgggctgtgtcctaaggcccatttgagaagctgaggctagttccaaaaacctctcctg

SEQ ID NO: 330 - DNA, 234 bp, Homo sapiens
agcaaatctagctttcagtattcctaatttttacctaagctcattgctccaggctttgattacctaaaataagcttggataaaattgaaccaacttcaagaatgcagcacttcttaatctttagctctttcttgggagaagctagactttattcattatattgctatgacaacttcactctttcataatatataggataaattgtttacatgattggaccctcagattctgtta

SEQ ID NO: 331 - DNA, 317 bp, Homo sapiens
acttaggagtggtgctttttctcagaaaacaggccacggtgtttcatacagaatgtcttcatatcatctgaaatggtatggctgaagttcatttgtttacagggtcgggaatgtcttcagttcttgagagtcaacagtaatgattggttgtaagccaagggacattttaagctagtgaagagttttttctggaattgatttttcccaaaagaatatattaattgaggttaagaagtcagtgggaaacacacagaaatttgttttaaaatctttcaggagctttactgaaagacttggttatcaagtcttttggggag

SEQ ID NO: 332 - DNA, 415 bp, Homo sapiens
gacttactttaacaaccagccaatccctacctaagcctagtagccatggtttggctaagaccgcagcgactgtatttagtaaatcctttgaacaagtcagtggtgtcacagtcccacataacccgtcatctgctgttggttgtggggctgggacagatgccaataggttttccgcttgtagtctccaagaagaaaagcttatttacgtttcagaaagaactgaacttccaatgaagcatcaatcaggtcagcagagacctcctagtattagcattactctgtccacagattaattagtaacatatttttctcccataacctagtgaacctggaaatacaactttgcttctttatgaaagtaccctgggtctttcatccgtattcctgacaggagccctgatgtcttaaattctga

SEQ ID NO: 333 - DNA, 489 bp, Homo sapiens
gacgggtccattaacaaagcgggctttgccgtcaactttttcaaagaggtggacgagtgctctcggcccaaccgcgggggctgtgagcagcggtgcctcaacaccctgggcagctacaagtgcagctgtgaccccgggtacgagctggccccagacaagcgccgctgtgaggctgcttgtggcggattcctcaccaagctcaacggctccatcaccagcccgggctggcccaaggagtacccccccaacaagaactgcatctggcagctggtggcccccacccagtaccgcatctccctgcagtttgacttctttgagacagagggcaatgatgtgtgcaagtacgacttcgtggaggtgcgcagtggactcacagctgactccaagctgcatggcaagttctgtggttctgagaagcccgaggtcatcacctcccagtacaacaacatgcgcgtggagttcaagtccgacaacaccgtgtccaaaaag

SEQ ID NO: 334 - DNA, 239 bp, Homo sapiens
cacagatagaacctgcacattgcccattaatgcacacttgtgtatgcctattacagtctgtgaagtttggtttagggtcagatgctgggcagagagctgtgaagccattacatattccttcccttgcacagtctgaatcatcccgacacttctcagactttgacttgaatgcacactgtgctgtacaacaaggaccttgacttggactgcactgtttcccaggtttcagtttgcatttt

SEQ ID NO: 335 - DNA, 432 bp, Homo sapiens
gccctgactgactgtattctctggccacattcaagtcccccattggtgggggcagagaagtaggaccaggccatccttggctacagagctcgaagaccccaagacagccctctgctctcagcggcgccacagagagcctgggctcagccttctgcatcaggacatggcctcgtccactgagggcacgatttaaacatttgacatcagaagctttatttgtaaacctcacacagataaggaccaagggctggcggtgtggccagaggacaggggaagctgaaggccccgtgcttgagctcggcagtcctgctccttgcagtgaagccaccatgggtgaccgtccagcctcacccggtggcctgcacagtgagggaagggcttcagggccatctgctcccagggcaggggacaggccaccaaggacctttggca

SEQ ID NO: 336 - DNA, 380 bp, Homo sapiens
aatgttgacatatttcctctatctcatagatggtaaaagtgttgcttttaaactggcaaatgcactcttcagaaatccttttctatctgatccacatggagaggttaaaggttcaatttcatgacctctatgcaggcagcgctctcattggatgtaagaatattacctgcaaggatagaatgcagttgtgcaacagagacacattcttatttcttttttttcacaattttgttttgtttttaatgacccttttattgaatattggactgaaatataaattttaaaaaacacgttggaaaggatgtacaacagaaggctatgtatgtatatacagtatgtcaaaagccttttatttttatacttcaaatgctctaaattaa

SEQ ID NO: 337 - DNA, 544 bp, Homo sapiens
gagtctctgcttgataagtgcctctataccaaccgctctcctcatcctgacatcttgatacggacttctggagaagtgcggctgagtgacttcttgctatggcagacctctcactcctgcctggtgttccaacccgttctgtggccagagtatacattttggaacctcttcgaggccatcctgcagttccagatgaaccatagcgtgcttcagaaggcccgagacatgtatgcagaggagcggaagaggcagcagctggagagggaccaggctacagtgacagagcagctgctgcgagaggggctccaagccagtggggacgcccagctccgaaggacacgcttgcacaaactctcggccagacgggaagagcgagtccaaggcttcctgcaggccttggaactcaagcgagctgactggctggcccgtctgggcactgcatcagcctgaatgaggctggccacctgccactttgccctgccctctgcctccagggctccactccccttccttttcttggtgaaaggcacctcctttcctgata

SEQ ID NO: 338 - DNA, 530 bp, Homo sapiens
tcaaagaacgcgtactgcagaccccaaatgaccttctggctgctggctttgaggagcacaagttcagaaacttcttcaatgctttttacagtgtggtggaactggtagagaaggacggctcagtgtccagcctgctgaaggtgttcaacgaccagagtgcctcggaccacatcgtgcagttcctgcgcctgctcacgtcggccttcatcaggaaccgagcagacttcttccggcacttcattgatgaggagatggacatcaaagacttctgcactcacgaagtagagcccatggccacggagtgtgaccacatccagatcacggcgttgtcgcaggccctgagcattgccctgcaagtggagtacgtggacgagatggataccgccctgaaccaccacgtgttccctgaggccgccaccccttccgtttacctgctctataaaacatcccactacaacatcctttatgcagccgataaacattgattaattttaggccatgcagtggaacctgtcacctaatgggactgc

SEQ ID NO: 339 - DNA, 75 bp, Homo sapiens
agtcatgcgaccaggtgagggtccacgtccccaagcttccactccctctggtgtttcccatttaagtatactgtt

SEQ ID NO: 340 - DNA, 376 bp, Homo sapiens
gatgctcacgtcacttggtgtaggtttcaggatcgcctctttgaggaaggacttcaggaccaactggggcctgcataagaaaacttatctcattattagagtactcacagcttgtatctcccagctacatcctagaaccccattgtcctttattccaccaaaccagctccaggtgaccagactctactcagaaagcaaattcgtcatcaaagaacagagactggccaccacaaggacatgcaggagaactgtcgggaccaggaagactcattccaaaaagcccaggccgggcacagtcgtcaagcctgtaatcccaacactttgggagaccgaggtgggggtatcgattgagcctcggaggtcgagatcagcctgg

SEQ ID NO: 341 - DNA, 499 bp, Homo sapiens
ccccgcctgtggcattttctatgggctcaggttacaccttcccagctggtgtttctgtcccaggaacctttcttcagcctacagctcactctccagcaggaaaccaggtgcaagctgggaaacagtcccacattccttacagccagcaacggccctctggaccagggccaatgaaccagggacctcaacaatcacagccaccttcccagcaaccccttacatctttaccagctcagccaacagcacagtctacaagccagctgcaggttcaagctctaactcagcaacaacaatcccctacaaaagctgtgccggctttggggaaaagcccgcctcaccactctggattccagcagtatcaacaggcagatgcctccaaacagctgtggaatccccctcaggttcaaggcccattagggaaaattatgcctgtgaaacagccctactaccttcagacccaagaccccataaaactgtttgagccgtcattgcaacctcc

SEQ ID NO: 342 - DNA, 183 bp, Homo sapiens
  misc_feature (75)..(75): n is a, c, g, t or u
cacccgagactgacacactgaactccacttcctcctcttaaatttatttctacttaatagccactcgtctctttntttccccatctcattgctccaagaatttttttcttcttactcgccaaagtcagggttccctctgcccgtcccgtattaatatttccacttttggaactactggccttt

SEQ ID NO: 343 - DNA, 558 bp, Homo sapiens
  misc_feature (72)..(72): n is a, c, g, t or u
  misc_feature (239)..(242): n is a, c, g, t or u
  misc_feature (400)..(400): n is a, c, g, t or u
  misc_feature (405)..(409): n is a, c, g, t or u
  misc_feature (411)..(416): n is a, c, g, t or u
tgggccttcccttaaacatcagaacaatgagatttgtccctattttacaggggttagaatagactattaagngacaactgagaaaggacagagaagtgacagccagaggttgagaggggccataaaaacatacaatcagacatatatctgctaccactttgtagcaagatggttcctatcataactctgggtcaaaaagatagtaatttggtttataatgttgaaagaaagcagaaagnnnnagatggggtctcactgtcgttctggagtgtagtggttcaatcatctctcactgcagccttgaacccctaggctcaaaggatcctcccacctcagcctcctgaatagctgggactagaggcatgagccactatgtcttgctgattaaaaattgtttttncaaannnnnannnnnnactttactgcctaagctggtcttgaaatcctggcttcaagcaatcctttcactttggcctcccaaaatgctgggattacaggcatgagtcaatatgcccagtctcttttctttcttagttactctagaaaatggcttgttga

SEQ ID NO: 344 - DNA, 526 bp, Homo sapiens
aataatgttctgtcacgtgaaatatttaagtatatagtatatttatactctagaacatgcacatttatatatatatgtatatgtatatatatatagtaactactttttatactccatacataacttgatatagaaagctgtttatttattcactgtaagtttattttttctacacagtaaaaacttgtactatgttaataacttgtcctatgtcaatttgtatatcatgaaacacttctcatcatattgtatgtaagtaattgcatttctgctcttccaaagctcctgcgtctgtttttaaagagcatggaaaaatactgcctagaaaatgcaaaatgaaataagagagagtagtttttcagctagtttgaaggaggacggttaacttgtatattccaccattcacatttgatgtacatgtgtagggaaagttaaaagtgttgattacataatcaaagctacctgtggtgatgttgccacctgttaaaatgtacactggatatgttgttaaacacgtgtcgataat

SEQ ID NO: 345 - DNA, 435 bp, Homo sapiens
  misc_feature (334)..(334): n is a, c, g, t or u
ttgtgtacacataatctcattttgagatatataactatttttgtctttcagaagtgaatcaaaatatttcaaaatgctgtcttatgaaactacaatattctcacagattagaaaagtttttctgtaaaagtcagatagtaaatattttaggttttgcagtgtcttttgcaactactcaactttcctactgtagcacaagagtagctgtggtactgtgcaaataaattgcttgtgttccaataaagcttcatttacaaaaacatgccatgggccatatttggcctgtacactgttgtttgccaagtcctaatatagttgcttagcaagtattgtnagctatttgaggaagacatgaaagttcattgggttgctaaaaagtatgtagaaattcaaaggaaaattaaaatttaggctaagttataatacactgtttta

SEQ ID NO: 346 - DNA, 343 bp, Homo sapiens
  misc_feature (95)..(95): n is a, c, g, t or u
  misc_feature (227)..(227): n is a, c, g, t or u
tctcatttaccttctctcttgagcaacgtcagtaattgatcttgcatctcagagagagagaaagagcatgtgtgagagagaaactggtttctatngccagcactcctgaaaccccttactgtaaggatattttctcttaccccttgggatccaggctctgagtctcttctctttgggagtatccatcaaaatgactttttttaaaaacagattttcccccaaccagnagaatctgcacaaacttggcagcgtttttacttgtttaatgagtttaagacattacatggtgaaagagaagcattttggactcctgcatttttatttaccattcccagactgacga

SEQ ID NO: 347 - DNA, 534 bp, Homo sapiens
  misc_feature (34)..(34): n is a, c, g, t or u
  misc_feature (74)..(74): n is a, c, g, t or u
gcctaacaatcaaatctctttcttttaaagcacnaccttctaggcagggacaggagctcattttccacaccatnctttgtcaactctcatagaaagttttccttgtatcgagctcaaatctgcctcctggaaattcttcttcttcttccctccctgttggtaccagctctgctgtcagagacttcacagtctgtgctccctctgccctgtgacgtcttcagactatttgagaacaggaatcatgactcctgggacttgccttttctctaggtcaaatacctctataattccatctgctgttcttcatagggtcttctccctatcctgcccttttcctccaatccatcttttaactgctcttgagcagtctaactgagaagtatgattcaaagcaaaataaatcttaaggtggcatgactctgaaaaaattgagaaaattgaactcagagatcccgatcccaacccctttctcctgggagtgaaaccttagtttctaccagagagtgtgggaaaccacttctggtggaagcccct

SEQ ID NO: 348 - DNA, 580 bp, Homo sapiens
  misc_feature (109)..(109): n is a, c, g, t or u
  misc_feature (241)..(241): n is a, c, g, t or u
aacattcccttgtcaaccaagaatactcaaagctacttgtattggaaatggcagaaggcctaaatccaaatttcttattttttataatttaccatagaagttttgtgantaaattcttacttctgccagtggaggtttatgcctgaaaggtcatggggtcctgtctgtaaatagacctaaagagaagtgcagtatttattctttgtaggcataatgtgtttgtcactgacaagcattcatnttcatcccactagtcttttattgcagtcttttattgtcattttcagccttatgttggagagctttgctttctcatcatgttcacattgtcttaagttttgtgagcttctgagaaagagcttggtaaaggtttaaaggggactttgttccaccagggagcattttatttgggcgtctcacccttttctaatgaaagctgttgtaagccacctctgacttggaaattctgaaagtatgaatattttttatatcttaattgtaaaatgccagttctccattatttagatgaatagtagaacactgcaccctttgtgcagtgtttttgtttctctactgcatt

SEQ ID NO: 349 - DNA, 541 bp, Homo sapiens
ccagtcttcctggcaagggtaaacagatcccctctcctcatccttcctctttcctgtcaagtgcctcctttggtgaaggtgacacatcatgtgacctcttcagtgaccactctacggtgtcgggccttgaactactacccccagaacatcaccatgaagtggctgaaggataagcagccaatggatgccgaggagttcgaacctaaagacgtattgcccaatggggatgggacctaccagggctggataaccttggctgtaccccctggggaagagcagagatatacgtgccaggtggagcacccaggcctggatcagcccctcattgtgatctggggtatgtgactgatgagagccaggagctgagaaaatctattgggggttgagaggagtgcctgaggagagccctcaccgtctggcaccctagtcattggagtcatcagtggaattgctgtttttgtcgtcatcttgttcattggaattttgttcataatattaaggaagaggcagggttcaagaggagccatggggcactacgtct

SEQ ID NO: 350 - DNA, 415 bp, Homo sapiens
gaataaatctctgggaccgggtctcaccatattgctctggctggtttcaaactcctgggctcaagcgatcctcctgcctcagccttccaaaaccaggtgtttaacttgggactaacatgaagcacttagaagactacgtggaacatagcaatgactatatatgtactacaacgtaaacagcacctcctggattgaatagaacataactgacatgaccagcagagacaggctaaagacactgagctgaaaaccctggactctattgctaaattgaggctcctgaatccgttcgctctgagcaactgttgctgtggtgctgccttcacaagcactctgctgagcactcagatagaggggctgtgctatccgtcaacagacaagctgcagccagaactgctcagctgacaaactggta

SEQ ID NO: 351 - DNA, 438 bp, Homo sapiens
gtggggaagcctgaacacagtcctataaactaaaggccactgcagacttttagcacaaggagatccttacagggaacatgtgccatcagctctttggagtgaacaaggaattagacccccatcatgccaaaaaactaggatttttaggtggtctttccatcccttcagatttaagtattcaaagaaagagagacagacctacattccaagggtcttctgagtgcaaggccttgtgttgtttgtttatttaggggagggcctggtgctcttctctgttttatgctttaccttcttttatttctcagatctcatgttagcactatgttctgaattccctaataatggctcttgagaactgatttacattttgttggtttgtttacttcttgagcacataaaaggaccccaaattagagatactatcccttgggcttctga

SEQ ID NO: 352 - DNA, 224 bp, Homo sapiens
gtccactgctggaaatagaagttttttcgctgcagggcaattctgtaaatgtgcttcccagctttaggaggtctgaggctactcttctccaataaccttccttcccactggaccttctcactcacagcactgctgccctctggacaagccacagtggacaaatatgtcaagctgaagatgcacaaataatttcaagttcagttctcagggattcaaaggacatg

SEQ ID NO: 353 - DNA, 415 bp, Homo sapiens
  misc_feature (177)..(177): n is a, c, g, t or u
tgtcctggggatcttggagcctgaattcattggcacaaaaggcagcagcatcctcactgtatctgcagtccatttggactcaataaaaactttgaaagtcacatgtgttatggaattccttctcagtgacacattcatctgtgctcagttgtcccagcaagggtcagcccctcatanccctgcagcatccgctgctatgaagcagagctgtaaacgccctccctgtgtataggaaaagctacatggagcaaatcctcctgcctgaagaagtgcatctcagcatcacttcagctgtcggggcatttgtggggagaaccagaccacctctgcggaaggcagcagaccctcttccagccatggatggagttgaattctctataaacggttcaccagcaaaccaccaatacattccatt

SEQ ID NO: 354 - DNA, 186 bp, Homo sapiens
gccaggttaatggtatcgatcctaatggggattcggcagagtttgatttgttgtttgaaaatgcttttgaccagtgggtagccagcacagcgtcagaaaaatgcaccttcttccagatcctccaccatacctgccagaggtacctcacggacaggaagccagagtttattaactgccaatccaaaa

SEQ ID NO: 355 - DNA, 457 bp, Homo sapiens
ctttaccctaggtcaggggtcagcaaactactgcctgtgggccaaatttgcccaccacctgtatctgtaaataaggtttcattggaacacagctgtggccatatgtttgtatattgtgtgtggctgcttttgcattaggatgacagaggtgaatagttgcaacagagactggctggtctgcaaagcctaaaatatgtcctgtgtggccctttacagaaaaagttttctaacccctgctctaggttacggagaaaaaaaaatggaataatgttctctgctacttttaacctgattttctttgtacctaaataggcagctagaatgctgcctatattttaataaggatttggatctcacaagacaccttaggcctacacaagttgttcagattctttgccccagttctaatctagtgacaaaggcatagaattctcctcccacaggaatgtatttctat

SEQ ID NO: 356 - DNA, 373 bp, Homo sapiens
cagtctcctgctcgtttagaagtaagggataataatgtatccatagctaaatgcccagtcgttatattttctagatcaagatgcttgttgtgtacagtttcacagagccttcggattttttctttaattttgttcatgtctttttcattcagtagcttggctgatgaagcatcttgttccagttccaaaagtcgaatcattagatccaagctagctctatcaagatccatgttcaaacgatctctactcagtatatacatgagggcagctgtacagagggacagattctgatggtgctgggaatcatccaaggttttaaagaccattgctaccatcccatgtgctctcaggtgcattcgccagtaggccaaca

SEQ ID NO: 357 - DNA, 116 bp, Homo sapiens
tttgctcctaacttgctcttggacaggaaccagggaaaatgtgtagagggcatggtggagaggctagagatcctgatgattggtctcgtctggcgctccatggatgcagggagagg

SEQ ID NO: 358 - DNA, 522 bp, Homo sapiens
  misc_feature (297)..(297): n is a, c, g, t or u
  misc_feature (418)..(418): n is a, c, g, t or u
  misc_feature (483)..(483): n is a, c, g, t or u
  misc_feature (486)..(486): n is a, c, g, t or u
  misc_feature (490)..(490): n is a, c, g, t or u
gggcatctggaattgacacaccattacattctgtttgcaggattttttttgtaaccatgaaattgaacatttccaaattataaactatgttaatacctataaaatatatagccaggaaccatttatcatcaagaaaagtgtaagaaattatttttgagatgtaatttaagattgttttatgtaaaaggaaaatcttgtatggcatcgaatagccttaatgaatttaattctttcacaaaaatgatttcaaattatcctagagtataacatttttatcaaagatattatttccggagntcttctttctttcttttttttttttttttagtaatttagcaaaaacattactgttctaatgctgaagtgacttttgccagtgccatgtccagggggggaggtataagttacttgctcttancatttgggctggattttttggtttgggggacacctttgggagtattcccaaagcatgtctcaagnggnggcncccgagagcatggtttaaaagcttggacccct

SEQ ID NO: 359 - DNA, 369 bp, Homo sapiens
  misc_feature (121)..(121): n is a, c, g, t or u
gctgggccagtgcatctaacagccctgtgcagcagcttcccttgcctcgtgtaacatgaggcccattcttcactctgtttgaagaaaatagtcagtgttcttagtagtgggtttctatttngttggatgacttggagatttatctctgtttccttttacaattgttgaaatgttccttttaatggatggttgaattaacttcagcatccaagtttatgaatcgtagttaacgtatattgctgttaatatagtttaggagtaagagtcttgttttttattcagattgggaaatccgttctattttgtgaatttgggacataataacagcagtggagtaagtatttagaagtgtgaattcaccgtgaaata

SEQ ID NO: 360 - DNA, 378 bp, Homo sapiens
agatactcagcactagactaacataacaggtcactacacgggtgcagaatcactttacaaaagaagactctgttttacgaaggggattcactacagggacttagagaacagtctcttttctgcctttaaaatgagagttcctccatttaccaaaatttgacacgcacacattcttcaggggcatgccaattgcgtaaagtgaggctcgcctgcatagctaatcctgttaaagacaacttctcaaagcacaacgtgcttgtttcctatcgggctccctgcggggctttctctcactacaagtcaagcttgggctctcaaagccctgcgcctgttaccacggatgcccacagggcctgggcagttgctgtggcgacagga

SEQ ID NO: 361 - DNA, 291 bp, Homo sapiens
acagtggatcaaatttaggcttcttgatgcaggcatggtgtagattactacttctgtattgtcccaggagctcagcacattccttgccagagatgataaggagctcaatcttgaatacttgttcaagcttttgaataaaaaaccacagttcctcaaagaagaagaagaattgcgaaatcaccggaaataaccgaaaacttccccctgtttgactttcaacattcttgaatgcaccaagatagcctctttctgtgagattaataaatgaataaatgcctccatatttttcaa

SEQ ID NO: 362 - DNA, 313 bp, Homo sapiens
  misc_feature (200)..(200): n is a, c, g, t or u
aagccggatggcaaaagagcccagaacctattggaactgacaaaatcaagtcacggcgcctacaaagatgaggggcagattctggctgccttttaatttcgtccttcacctgatatctgtgccagagaatgtcttccaggagttctgctacagagaagagagtaacccccatccatcatggccaaagcacccagtcaggntccgctctggatccagcccgacaaatgcaacccttgaatagggtttgtgcaagcaaactggatgacgaccgaagaaaccctgtcgcttctgagaagacacccaatccaagaat

SEQ ID NO: 363 - DNA, 318 bp, Homo sapiens
cctggacccaactttgttactgtgagaaagggtcttcattcattcaagatggcatttgttaagcacctactgctggagtgcagtggttcaatcacggatcactgcagcctccacctcccagttcaagaaattctcatgtctcagcctcctgagcagctaggattacagacaaaccttggaaatcaagaaagttctggaatgatgaagctgttcatgccaagaccgaaagtgctggcccagtatgagtccattcagttcatgccgtgacaattttcttggaactcctttttattgttagttctcacttgtttccatatt

SEQ ID NO: 364 - DNA, 531 bp, Homo sapiens
  misc_feature (117)..(117): n is a, c, g, t or u
  misc_feature (119)..(119): n is a, c, g, t or u
  misc_feature (122)..(122): n is a, c, g, t or u
  misc_feature (153)..(153): n is a, c, g, t or u
  misc_feature (155)..(155): n is a, c, g, t or u
  misc_feature (241)..(241): n is a, c, g, t or u
ttagcatcttggttactggagaactataacttttatgtagtcatgcttggaaaacactaaaagggaaatcgagtctgtttgacaatattctgtcttcactgttgttcacttcataangngtnggaatataaagttctatacagttaatatgangntctctttagcatttaaaacatgatttgcattttcatgaggcattttggctaattttattgatttccttatatttcatagtccttanccttatgagaatcttatgtttctgtgtgttttctatcatgtagcacaatttctgacacacaaaacatacaataaacttgtgttaatttttctatcaaagtcagaatttattcataaggaatctgaagtaaggtgtactaagcttgtttatgggttaagtgatatagccaaattcaaaactttactttttatgtcagtctagaaatatctcagattaaaacatatcacttcttagttccaattagataagggaaatcttttataataatgccaggattgctataatctgat

SEQ ID NO: 365 - DNA, 525 bp, Homo sapiens
  misc_feature (35)..(36): n is a, c, g, t or u
  misc_feature (39)..(39): n is a, c, g, t or u
  misc_feature (78)..(78): n is a, c, g, t or u
  misc_feature (86)..(86): n is a, c, g, t or u
  misc_feature (92)..(92): n is a, c, g, t or u
  misc_feature (234)..(234): n is a, c, g, t or u
aggccatagtaatcatcctgctgatattgcaagtnngtngctagaatgaggttatataatatatacaaaaacattttntcaactgntaaagntgccttagtaatatagggtaataccagcaacattatggatatataattatagtctattgggccacacttaagtttggagtctaataaagtcacaatcaaattctgcaatttcaattgaagataaccttgtctttatattatnaattagaagctaaagttgatttttctaagagttctttatttaaatgaagtactctgggactgaccttttcggaaatggaatcttcattggtcaggtgattcaacatttttatacaatttatccatcctcatctcttcaggatttgcataccttgccagtttctactggccattgttgaaaatacatttatttggagaagtccaaagccaaggggctcatggggctgtgaggtccttcttgctgcatcgtcctgtggtagaaggtggaggagtcaagagagtgccccagagt

SEQ ID NO: 366 - DNA, 267 bp, Homo sapiens
gggccaatgaaagcagggtcaaggacaggaccagcgcaggccaaggaagggaatatctgacagcgcccacccagccaaaccctcagcccaaggacaggaatgaggagatgctggtgaactagccatccatcagtacctgccttcccccgaggctgcagccccactcccaggcgcctggccaggggagttttctaggttctgagagccacgttgtcatccctgggctttgaagttaaacatcacacagctgtctataaacaagatttt

SEQ ID NO: 367 - DNA, 199 bp, Homo sapiens
  misc_feature (67)..(67): n is a, c, g, t or u
  misc_feature (107)..(107): n is a, c, g, t or u
  misc_feature (120)..(120): n is a, c, g, t or u
gattcagggattggatgagtctctatggtttgttttgccctgaagagcagaaggcttctgtcccaantggtgttgccaaagcaacatattaattccatgccatgatnctgggtcaagatntgcacaatctgattgggcatgtcacctcggatggcaagggagtggaagtggtcaaaatcatggagtcccagctttcgga

SEQ ID NO: 368 - DNA, 372 bp, Homo sapiens
gccccatgttgcataggtggcctataaccagtcagacacaggagacaacatgaagccccatctgtgcttccctttctgacattaccacatttgcctgatggagtggccagctccctttcactgctggaatgaatacaatccagaaaacctaccttctattgctttacctaatggggtaaggaaatttaagtagaaattgctaaccgaagactttgctaagcaaacccaggtctgcttgatgtcagagcccttgctgttaaccccatttactgcttagcctccaaagagaagcaatagcatcacatggggaaatgtcaacagcataagaggactttcataatcagaatttaaactggctattatccctctgga

SEQ ID NO: 369 - DNA, 296 bp, Homo sapiens
gaccgtgactcctgaagcttttcagcgcaggtgtagccggcttggcgtcgccgcagtgaggtttggagccgctttggattgctgagtcactttcttcagccacttagggaaaccgaaagtggaaactcgtggggcttgaaatagtgtgttctcttgagaaccaccgaggcagtgagatttgggattccggggtctggagatcgtgctttttgtggactgcgtttgcagttcctagggtgctgctgattcacaggccttctctgtctttaagtgtgcagatcattgaccgctcagtt

SEQ ID NO: 370 - DNA, 228 bp, Homo sapiens
aaacccagagccttctggatgtgtgaggtagtaggcttcaaccctcattcatgcataggtcacacttctccaaagttggtatggcctgtctccttggcatgttcccttgcttctgcttgtccagttaatcctttctgacataccatgcatctcagggtgaagcggttgacatcagtaaactgtctccttcttctagcttcatctgctaattccagtgcttgtacaaga

SEQ ID NO: 371 - DNA, 206 bp, Homo sapiens
cctcctgatcaccatagctttatgcaacaacaagaaacaaatttattagctaacctaaccactaatgacgcaagagacaattctaaggactttcaaaacagcaaagtaggagcagctgctacctctagggatgagggatgcaattgtccaattattggtgaaattgtcatttcatgctattggctatttgaaattcctcctctaat

SEQ ID NO: 372 - DNA, 463 bp, Homo sapiens
  misc_feature (94)..(94): n is a, c, g, t or u
  misc_feature (121)..(121): n is a, c, g, t or u
  misc_feature (382)..(382): n is a, c, g, t or u
ccctgcctgtactaatgatccaaaaattagccaggtgtggtggtgcgtgtctgtagtgccagctactcgggaggctgaggcaggagaatctcangaacccgggaggcggaggttgcagtgngccgaggttgcactactgcagtccagcctggctctgtcttggtgttcagccatgttcccatgctcactcccaaggtgactctgggaaggtctcagcctttttgtcttcccagttaggatggtcccatgcccctgttaccatcagacttggtaagtttcccgaggagactctgcaagaggcactgttctggatggtggaggagagactagttgttctgctctcctggccacagtgggtgcagtggaccccatcatggagaanttcaacacatccagcctacgaccagcacctgtgggaggtggatattcaaggcagcagagcctacagccggggcatggagaa

SEQ ID NO: 373 - DNA, 451 bp, Homo sapiens
  misc_feature (38)..(38): n is a, c, g, t or u
  misc_feature (87)..(88): n is a, c, g, t or u
  misc_feature (231)..(231): n is a, c, g, t or u
  misc_feature (406)..(408): n is a, c, g, t or u
  misc_feature (421)..(421): n is a, c, g, t or u
agggtctcaaatgaactctgagttaccatctttggacngacttttaatataaagctgtaatccttaaatctgtgtcagtagtcccanntactatgtcactttaattggatgaatgcgttaatgaaaagtttgttttcaaacctcactaaactgctacttaagatcacagttaatgtgagtcctgcttaatttggaaagcatttaaaaaatggaaaagtttcttagggaagnaaaaattttgcaactctgcctacaaggtacagtaattggctaggttcttttgaagagcagtgttgactagagttaaggaaaagtcagttgtgaaaaatggacatttttaatagcaaaatgatgtgctttactgtagaaacaggaggaagggtgcattatcctggggaaaatgaannnttcttcagttatnttttatgctgctctactttattgcaaaacg

SEQ ID NO: 374 - DNA, 46 bp, Homo sapiens
cagtcaccgaccttccctgagattgctacctggaagctctttctat

SEQ ID NO: 375 - DNA, 519 bp, Homo sapiens
gaataagtacacagagtccccaaagactagtgaggccaagatgtgtgagtcattttccatcacacacaaaaaacccaattgttctaagtatgtattttaccaagcagctttatagaaagaaaaacaaacaaacaaaccaaacaacaacaacaacaaaaaaccttggccaggcacagtggcttacacctgtaatcccagcattttgggagattcaggcgggtggatcctttgagcttgggagtttgagatcagcctgggtaatgtggcgaaacctcatctctaccaaaaatataaaaactagccaggtgtggtggtgcacgcctgtagtcccagctgcttaggaaactgaggtgggaagattgcctgagcccaagaggtagaggtttcagtgagccgtgggaagattgcctgagcccaagaggtagaggtttcagtgagccgtgggaagattgcctgagcccaagaggtagaggtttcagtgagccaagattgtatcactgcacaactgttgcctgggca

SEQ ID NO: 376 - DNA, 222 bp, Homo sapiens
cctgctggacagccgcgcaggatgagccggagaccccgagggccgtggccttccaggactgccccgtggacctgttctttgtgctggacacctctgagagcgtggccctgaggctgaagccctacggggccctcgtggacaaagtcaagtccttcaccaagcgcttcatcgacaacctgagggacaggtactaccgctgtgaccgaaacctggtgtggaacg

SEQ ID NO: 377 - DNA, 460 bp, Homo sapiens
atagtaggggcaattttgtctgtagatggcagtatgacaattcttgctagagaatatattgaaaaaaacttcaacacaaagggttgtagcactgtcctcagtaccattgtgtgcatgaggatcagaatagtctgggctagatacatcacattaaagcttttcagaatctgataaatagctctaaatactaatgatattgagaagcctagcttcacttgggaaaatctgtggctgttcacagaaattcagcaccaagttattccccccatactctaccaggccttcaggtcctcataaagaaaagtgtcgttttcagattaggaactcaaaattattttggtgcatcaaatctacagtcacacaatataacaagaatgggattagaaaaatgaaagcctactcattctcatctttaagccagagaatgaaatatatatgaggtctctggatagctatttaa

SEQ ID NO: 378 - DNA, 544 bp, Homo sapiens
cgccgcatcaagccgtggcggagatcgacgcgctctacgacgtgtacctggacgtgatcgacaagtggggcaccgacgacatgctgttcctgggcgacttcaacgccgactgcagctatgtgcgggcgcaggactgggccgccatccgtctgaggagcagtgaggtcttcaagtggctcatccctgacagcgccgacaccacggtgggcaactcagactgcgcctacgaccgcattgtggcctgtggcgcccgcctgcgccggagcctgaagccccagtcggccaccgtgcacgacttccaggaggaattcggcctggaccagactcaggctcttgccatcagcgaccactttccagtggaggtgaccctcaagttccaccgatgactcgaggcctgactggggcatgccacctgcagaccctggctctgaggaatggcccaacagtggccccttcagggtggcagccacccttcagtgaggccccaaggcagagtcggctgggcgtggaccaggggcatggacacgtgatgtgctgctctgta

SEQ ID NO: 379 - DNA, 254 bp, Homo sapiens
gaagtttgtcttcctacaaccacgtgatcctctctctgggatttccccactcaaccagggacaagaggtcaaagttgacctgattatgtgtccatcaaggaagtgcccctggaaggcaaataaagaaggcaccatttacattacagtctcctaagtgcaggcaatgataccccaaggtggggctctgcagaccctccagcaaagagcttttgaaaataaatgtgaagctgggcttaggagctcatgcctgcaat

SEQ ID NO: 380 - DNA, 398 bp, Homo sapiens
  misc_feature (140)..(140): n is a, c, g, t or u
  misc_feature (295)..(295): n is a, c, g, t or u
aacctgctaaccaagaatgctttacctggcaaagctgtccttcagaaatgagggagaaatgaaagctttctcagacaaacaaaaacaaaggaaacatgtaaaagtgaaaaaataaatggtataagtaatatatagtcccnactcagaattctctaatactgttaaggtggtgtgtgaagcaatcttattactactaggagggttaagagacaaaactattaaaaacaactgcagctacagtatattgttaaaggacacaaattttaagtttacatcaaaatcagaaaacatgggnaaggaaggaatgaaagtgcagagtttttgtatgtgattaaaggcaaattgttatcagtttaaagcctgttttaaggataaaatattttatgtaagcctcatgg

SEQ ID NO: 381 - DNA, 276 bp, Homo sapiens
cccgccgcgcgagattaaaggacagaccaagagggcgcgggagctaccagcttggaggggaggacagatggggacccagggctggccagggctggtctctggagctgttctgccagagtgatgggggcgcttggcgaggccaaggatttggttgggtcctatctctgagacattttgaagtctcacaccccttccatttgttgcctattccacttaactttgtatttgtttgaaatctactgttcggatgctggactagaagagggacacttggcc

SEQ ID NO: 382 - DNA, 119 bp, Homo sapiens
aaacataacagaggagttgcgaattttatgaaatttctgagtcttacaaacttctctttaagactatgaggaaatgctgacttgtattatttatatcattaaatttgcttgtgtatggt

SEQ ID NO: 383 - DNA, 490 bp, Homo sapiens
gtccctgctgtttagtatgctggagtggaggttctgtgacttcctgtttagtggtgctgattctagttggtgtgaaacgtcagatttcatcccagtcgcgtggctgatttttttatgtgtggttctctgtgtttccagcctggtcctgctggtcaggatcctctgtggatcccggaagatgccgctgaccaggctgtacgtgaccatcctgctcacagtgctggtcttcctcctctgcggcctgcccttcggcattctgggggccctaatttacaggatgcacctgaatttggaagtcttatattgtcatgtttatctggtttgcatgtccctgtcctctctaaacagtagtgccaaccccatcatttacttcttcgtgggctcctttaggcagcgtcaaaataggcagaacctgaagctggttctccagagggctctgcaggacaagcctgaggtggataaaggtgaagggcagcttcctgaggaaagc

SEQ ID NO: 384 - DNA, 458 bp, Homo sapiens
  misc_feature (72)..(73): n is a, c, g, t or u
  misc_feature (229)..(229): n is a, c, g, t or u
gatacctcattatacatcttacagagagcatcattggtgtttccaaggtcacagggctaggcaagggtgganncctgagtctgcttgtctgtttgccccatgacagcccaggggtggtggcctcactccacctccaggcacccacaagaatataaaatcttgtacaaggatgtcgatattactattgccattcccaagtgcacctgcacctgtagtatcaggtggtttncagccttggctgcatagctgcatatgagaatcacctgggaagcttttaaagatcccagtatccccacctcttccccagttacagtggagtcttgcgggtggtgggggacatcattatttttgaagcttccaagtaattctggtgtgcagtggggtgaccagctgtcccagggacctcctttaaaaaataatatcccgggcacatgacaggccaattgccctaatgcaac

SEQ ID NO: 385 - DNA, 510 bp, Homo sapiens
  misc_feature (343)..(343): n is a, c, g, t or u
  misc_feature (467)..(467): n is a, c, g, t or u
  misc_feature (471)..(476): n is a, c, g, t or u
cacctctgcacttttgtaggctcaacaagtactggggagcctgccaccactgtatgcctttgaggcccctgccctgcctccctggctggccacggagctcgccctccctggtagggggtgagtttggaagtgagaggctggtgtgggtctgtcccatgagctgactcacacttgcctcaccacacataccatcagaagacccacgtggtggagctaccgctgctgctccccacagtgcacctaggcaccctcctgtccttcccatggcactcggttgacctgggggttcctgtccaacaggtgaggcctggtgtgcacagacactctgccattgctagaaggnggctgtgccccctgctaagatatcagtaggtccttcacagcctcaccttgttcctcccatttgtttttaaaaattgtttcttatatatacagtttatttagcttacgtaaacatttggtgcacntaannnnnntcaaagatcatgatgtctcttttgtggttttata

SEQ ID NO: 386 - DNA, 92 bp, Homo sapiens
cctctgccattgcccaaagaaagtacgcaggagggaaggcgccgggggcgcaggagtcggggggaagtgaaatctcggcattagaacccccg

SEQ ID NO: 387 - DNA, 394 bp, Homo sapiens
aaggcgccgtcaagtcaaataaataaatgccctacaacaccaacccaggactgagatctgcatgctggaatgacggtggtggtggtggctttcagtattccccaggttttgtccggagcaccggcacgccctctcttgaagtccgctctccgcacagtggttagacgggaagatccggagctgtccagtgtcttgggtaatgcacggcatcgcctgatgtctgacgctagaacaccacgtaaagtcaagcagagggaagtgaatgcgccctaggcccctgcaggccaccaagaagagctagagggagttggtgcaatcctagagatgccggcaggtgcaccaatctgtggcacacgtacgctctccaatggaagacaactcaagaccacaccaa

SEQ ID NO: 388 - DNA, 289 bp, Homo sapiens
actataatgcacttcgcaaaatgtaaggggccggcttcacgccagcggggccttctgggactttgaattcaaccaggtgagcgctccaggtgccccgacaggcgcactgtagccactgggtgttaggggcgggagtctggaaggtgacggtagacggccacttgggcccttctgggggcgagcctactggtggggtcagggctctccgtgctcagagcaaggtagaggagcaaggccctacttttggggggcagggtccagaccaaggaccctatgcgcggagggtggc

SEQ ID NO: 389 - DNA, 139 bp, Homo sapiens
aggcctgaccgaagagaactttaaggaactaaagcaagacatttctagtttccgctttgaagtcctgggattactaagaggaagcaaactttccacaatacaatctgcgaatgcctcgaaggagtcttcaaattcggca

SEQ ID NO: 390 - DNA, 528 bp, Homo sapiens
caggttcttgaagttctccaccatgacatctcggtacagcttcctctgggtaagatcgagcagtcgcagttcctccctggagaagaccacagccacatccttgaatgtcacagcctcctacaatatcaaacacatgtaacctcaatcttacaaccaaccttcactagaagaagggtggcatcaagaaggaaaagagcaccacaaaaaagttgttatagattccaagagatctcagtcaattttcagctgttacagttttccctgtctcactatctcctacgctcatccccataaagcctgtagtttatcactgttttttgtttttttcttttttgagatggagtctcactctgtcacccactgcactccagcctgggtgacaggggtgagacactgtcttaaaataaataaatttttagaattaaaataaatagatcataaagtgtttgaaaggatcagatgaatgaatatatgtcaagcacttagaagtgcctagcacaccatacatgctcaataaactcgaacaac

SEQ ID NO: 391 - DNA, 443 bp, Homo sapiens
gccaggggtcgccaatcctggaaccccactggcttagagggctgggggagagaaacatgctgccctctttgtagcagtcaggcgctgacccaagagaactcaccttattcttcatttcgcctggtaatcctccaggcccttctctacaccctgaaggggagggaggaaaatggatgaatgagagagggagggaacagtgcccaagcgcttggcctctccttctcttccttcactttgcagaggctggaagacggcagccgccggactgggcagatcctcaagcagacctacagcaagtttgacacaaactcacacaaccatgacgcactgctcaagaactacgggctgctctactgcttcaggaaggacatggacaaggtcgagacattcctgcgcatggtgcagtgccgctctgtagagggtagctgtggcttctaggtgcc

SEQ ID NO: 392 - DNA, 463 bp, Homo sapiens
tattggcacgtagcagtacaaggatggtgaggggtgggtagggggcagacagctaggcacttgaaaggaaagctcatctggaaagattggatcgtctcaaatgcacatactcgtacactcgattgaagcgtactctgtgcctactagatcttttcacagccaaaaacacctggcaacccttggagaagtaactattcctttttttcacaagtaagaaaatagagcctcagaaaatttaacagttgtctaagctagaaagtagcaggactggactttgaagtagtctttaggttgtgctgtacattttgtggatatgcttaaatcacagtttagcttgtacacattttcctttattagaattggaagtaagtattaatgtttgaaaaaatattttagcctgacaatatttattctatcttcatatgtttttgaaattagatattttaaactaggcacggtggct

SEQ ID NO: 393 - DNA, 376 bp, Homo sapiens
  misc_feature (26)..(26): n is a, c, g, t or u
  misc_feature (65)..(65): n is a, c, g, t or u
  misc_feature (99)..(99): n is a, c, g, t or u
  misc_feature (123)..(123): n is a, c, g, t or u
agctcattttagtctcatttctctcnctcccttcttccctgatgaataaagtttattgggatggntttcagatgctcagcttttccatatgattaggtnagtgatccagaacccttccaaagnaccctgtggactcaaccctctgtttgaacaacatacaagataatatgagacatttatttatcgaggaccctctgagcacctggcactgtgccagattctttcagatatataaaatttcacttgctcctgttgattctggaaaggagcaacggcatcttatgaagctgtagcagatactgtcctggcctcgctcatgtgtgtcagatgtgttggagtgccctggctgctgctctgcatgtgtagctgaggtcct

SEQ ID NO: 394 - DNA, 220 bp, Homo sapiens
tggattcatgccaaaggaaactgaaagcctgcctttctttttttcccagtgcacatctcagattatttggcctttgtccgaggactgaaaacagttctgtgtccaagtatgtttttaatacctgatatttatttcacaaaaaaactgaaattgctttgtgtgtccaggcttgaatgtttaaggcatacttgattaatacatgtgtgctgagtgcttcctg

SEQ ID NO: 395 - DNA, 553 bp, Homo sapiens
caaccgccacatagtcacattgtcaaatagcgtattcaccttctcttataagaaggctcagcgagatctggcgtataagccactctacagctgggaggaagccaagcagaaaacggtggagtgggttggttcccttgtggaccggcacaaggagaccctgaagtccaagactcagtgatttaaggatgacagagatgtgcatgtgggtattgttaggagatgtcatcaagctccaccctcctggcctcatacagaaagtgacaagggcacaagctcaggtcctgctgcctccctttcatacaatggccaacttattgtattcctcatgtcatcaaaacctgcgcagtcattggcccaacaagaaggtttctgtcctaatcatataccagaggaaagaccatgtggtttgctgttaccaaatctcagtagctgattctgaacaatttagggactcttttaacttgagggtcgttttgactactagagctccatttctactcttaaatgagaaaggatttcctttctttttaatcttccattccttcacatagtt

SEQ ID NO: 396 - DNA, 357 bp, Homo sapiens
  misc_feature (90)..(90): n is a, c, g, t or u
  misc_feature (103)..(103): n is a, c, g, t or u
  misc_feature (111)..(111): n is a, c, g, t or u
  misc_feature (114)..(114): n is a, c, g, t or u
  misc_feature (124)..(124): n is a, c, g, t or u
  misc_feature (132)..(132): n is a, c, g, t or u
ctagaaactcactcagtcctgtggttgccaacctttctccatctcccgcagacgttttactgcatgccagataccatgtgcagtaacttntgaatcctctcanccccctanctnccagaacacnggactatnagttacttgaaagctgaggcttggtagagggctggagccaattgcgttaaactaactaacattattgcaaaatatattctagggcttttactctaataaaaatgactcctggaactgcagtactatattcttggaaccccaagaaaccaggtgacaacccataaatttaccatcacttttcagatgaggaaggcaaatctggaaggccaaattacttgtccaaag

SEQ ID NO: 397 - DNA, 423 bp, Homo sapiens
  misc_feature (184)..(184): n is a, c, g, t or u
  misc_feature (195)..(195): n is a, c, g, t or u
  misc_feature (350)..(350): n is a, c, g, t or u
gttagcacataccattgaattcactgagacacatgagaaaatatgggaaagtcggagagtggaagtaaatgtaaagacccccctcctccccaaagagtacgttgtgtagtggggtagagtggaaaatcaatccaagaaaagtagcaaacggacccaaagatgaagaggaagaaaagaaacagcnacacgaaacgnaaaaaaaaagccaccagatttgttgcaacgttgatgtaaacctggccgtcttcctgaaccagtgacccagggtttccgcttccctttgctgtcatcttgctcaagtctagaagctgaaatatcatcatcaactcgacatgaggggataacctctngatccactcatcagatgctcatcagacgttccaattacaaaactgaacctcttcttagtgctggggcggttag

SEQ ID NO: 398 - DNA, 515 bp, Homo sapiens
  misc_feature (132)..(132): n is a, c, g, t or u
  misc_feature (150)..(150): n is a, c, g, t or u
ggacaaaaactttcccaagtcagctttttactatgattacgtcctagcctcagatgtggtctaccatcactacttcctggacaagctgctcaccaccatggtgtacctttcccagccagggacggtgctgcnttgggcaaacaaattcanggttcagcaccgactatgaatttttagataaattcaagcaagtttttgacacaacactgttggctgaatatccagagtcatcagtcaaactttttaaggggatactaaaatgggactaaatccaacaaaatgcctttcacaacgttactgtgtcttttgagcaatgtgttagaaattgctttggtaatagacttctttcacaggattgagaaggtagtgcatagaaacaacttgtatacttggaacaaatgtaacaatactgcagaaactttctaatttctaagataatttaagattatctggttaatctaaatatctaaaaagaacaacataaaaacatgaaagtagctttgttggttccaacg

SEQ ID NO: 399 - DNA, 483 bp, Homo sapiens
  misc_feature (55)..(60): n is a, c, g, t or u
  misc_feature (62)..(63): n is a, c, g, t or u
  misc_feature (65)..(65): n is a, c, g, t or u
  misc_feature (85)..(85): n is a, c, g, t or u
  misc_feature (88)..(88): n is a, c, g, t or u
  misc_feature (90)..(90): n is a, c, g, t or u
  misc_feature (93)..(93): n is a, c, g, t or u
  misc_feature (134)..(134): n is a, c, g, t or u
  misc_feature (278)..(278): n is a, c, g, t or u
  misc_feature (304)..(304): n is a, c, g, t or u
gactgccatctgatcaacagctacccttcagccaatttcacctttctgttacttnnnnnnanngngcccttgtgtggataatgtncancncantaaggaatgcatgttaggtactttaagtcccagtagaatancagttcataatatcacacatgtggtgaaatctaaaaaggcaatagggctaattttggcaggagttggaatagccccttgggatggctttgcatactgtcagacagctttgagaaactttcaaacccttgaaacactggcaactnagtacaggcagagccataaaaggacntcaagcctccctgcactccctagccaatgctgtcttggataacagatttgccctggaatatcttctggctgaacaagggcgggtatgcacagtaataaaccacatctgttgttcttacattaacagttcaggattggctaaactgcaagttcaaaagatttaccaagaccaggcacaat

SEQ ID NO: 400 - DNA, 555 bp, Homo sapiens
  misc_feature (483)..(483): n is a, c, g, t or u
ggagcaaaacacttggaacccacaagactcccagaaggtgaagttaagagctcccagactcataaggttattagaacagcaaactggcaccccaaagaactttacggagacttgcaacctatcaacaagttggatgagggattaaaagccttcaacaaccaacaaccccaagcatcaaactgaaggaaacattctaaccttcacagacagactggaggctggatggggacctggctgaagacatctggagaatgaaagttaagtaccagcttgcatttttgtgcccctagattatttttgcattttaaaataagaagcatcaaattgcgtgtctctgtgtaaaagttctagcaatttgttttaaggtgaacttattttggcttagggactacaaaaagagaaggtaattcctagggaaggaagaagagaaagaaatgaaaattagagaataagattattttgaatgacttcaggtagcgaggngtgtgtgtttgtgagtgtgtatttgagagacttggctcatgcctgtgggtcttctcttctagtatcagtgag

SEQ ID NO: 401 - DNA, 327 bp, Homo sapiens
ggctgagaaactactggagcaccagggacagtctgtaaagttggatggaccaccaatgggaaaatgagagctgcccaccctggccttacactccttcaattaatacataaacagaaaggaggatatacagagagccaaaggcccatgggacgtgaccaacattccactgagtctatacgatcaaacagcaaactgtttatcatgaatacagaatgtgggcaaactcatgactgtgcctgccccagaaggtttgctgagggcaattgcttcctgacgccaagctccttgaggttatctattgggacatccagagaatgcagtcttgca

SEQ ID NO: 402 - DNA, 497 bp, Homo sapiens
gggtggcctggggatagtggcttcatcttttggggcttcaagattctttgtctttaaaatcaggggttatatcaagatcatcaaagttcccattccattaaagaaaaccctgcatgtatccataatgatgcttcttcctgttaaatttacaatgaagggaaacccatcacttaactgtaggaatttcccaaaatgaactgatgaccagtgatctctctatcagaaaatggcagatttctagccttccagaactttgattttcttggacattcaatggttcctttttcccaaatatttttcaactgatgccaaaccttggatttggtttaatccacctttggtttaggtttggggacccttttcctggaccgtcccagttttgggttaaaccgatttggatgaccctgtgagtcgccactggataccgacagtctgctgtggtgcttagaagccactgaaacattggtgaatgtgaagtcacttttggggtgcctgcc

SEQ ID NO: 403 - DNA, 512 bp, Homo sapiens
gaaagctccaaatccatgacagtcgaagtctctgctccttcaggaacaggacatcttcctggccttaatccattatagcagccgtgatgtcatttctgtatttcaggaagactggcagacagttgctttcattcttcctcaaagtatttaccatcagctacagtccaaaattgctttttgttcaaggagatttatgaaaagactctgacaaggactcttgaatacaagttcctgataacttcaagatcataccactggactaagaactttcaaaattttaatgaacaggctgatacttcatgaaattcaagacaaagaaaaaaacccaattttattggactaaatagtcaaaacaatgttttcataattttctatttgaaaatgtgctgattctttgaatgttttattctccagatttatgcactttttttcttcagcaattggtaaagtatacttttgtaaacaaaaattgaaacatttgcttttgctccctaagtgccccagaattggga

SEQ ID NO: 404 - DNA, 229 bp, Homo sapiens
caccccattcaaactcaagcacagtatgcctccccagtctttatgcagcctgtatataatcctcaccaacagtactcggtctatagtattgtgcctcagtcttggtctccaaatcctacaccttactttgaaacaccactggctccctttcccaatggtagttttgtgaatggctttaattcgccaggatcttataaaacaaatgctgctgctatgaatatgggtcgac

SEQ ID NO: 405 - DNA, 495 bp, Homo sapiens
acagctcaggttttatcaccgactgggaatagacaacctcaatgctgaaccgcactggagaaaaggggcaaggtacccctgctgaggtgtatgggctgccatctcaggctgtcttgaggacctgggctccctctgctactcccaggaaatgggctcctgacacagcagtctgccaccacagccccaggagggtgtcaacaccagcaaatgctgtatttgcagcatgtccaagatgacccttctcccctacctctacctagccactggcagggaggggagacagtggtgatagcagcagcactctaggcatggtgaacgcctgggaccaagccatgtggcgttttttattttgcctttctggaagactcaagatatgtctcttcattctctctcagtatttgtttactttggtttttttgtttttaatctcagagagaggtgtgtttagtgggcacaagctgtaatattcagcaaaactttgtcgactggcactgt

SEQ ID NO: 406 - DNA, 472 bp, Homo sapiens
  misc_feature (77)..(77): n is a, c, g, t or u
  misc_feature (79)..(79): n is a, c, g, t or u
ttcctcttgctgagaaaacccaccctgctcacctaaaccctggccttgcctggtaattccatccatgcgcctggaangncccagacatcaaggctctgaggggccaggcacggggagaacccagcagtgccctgccctgcagtctgagctaccagattccttgtgaagataatttgaggaccatgactcacccaaccacatttcctggggcctcaaattgaaaattcaggatgggcttttctatatgactggctgatatccaactatgccatggtctttacatgccatgaacattctttcctgccagagttctaagaatctgtgttctctgccttagaccttctgcagatgagcccacaggaagctccacgtgtagctgagctacatgcaccaggcctcagtttgccccaagtcccctgtgtactctctcatggcctgtggccaagaaatgtattctctcactttggactta

SEQ ID NO: 407 - DNA, 395 bp, Homo sapiens
agcagatggaccctactggaagtcagttggattcagatttctctcagcaagatactccttgcctgataattgaagattctcagcctgaaagccaggttctagaggatgattctggttctcacttcagtatgctatctcgacaccttcctaatctccagacgcacaaagaaaatcctgtgttggatgttgtgtccaatcctgaacaaacagctggagaagaacgaggagacggtaatagtgggttcaatgaacatttgaaagaaaacaaggttgcagaccctgtggattcttctaacttggacacatgtggttccatcagtcaggtcattgagcagttacctcagccaaacaggacaagcagtgttctgggaatgtcagtggaatctgctcctgct

SEQ ID NO: 408 - DNA, 397 bp, Homo sapiens
attttcctcataaagcattgctccagctaatcttatctatttttctccagaatctccatccccttcccgtcagatacatctaaaactttttttgtatctttgtttttcctcgtgttgtatcatcttcctaaaacatgttctacttgtgaaaaccctaagaaattctctctgtcttattgaaattctatctccactgtgaagcattatcatggtgtggccatatatgatctatccctatctgaagtcactgcatttattccctgatcctcatttgcaggtccagtaccttgtacaagtttctttttgtgccatattagactgtaagctccaagagggcagggcccaagtcttatgaatttgtgtctgcatagtgtctagtacttgtctgaggcccaca

SEQ ID NO: 409 - DNA, 48 bp, Homo sapiens
aggacgtaccttgtgagatgcgagccggccaacagcttgcaagcatgc

SEQ ID NO: 410 - DNA, 459 bp, Homo sapiens
gcaagtcgcgtgatttctaccacacctgctactgcctgagcggcctgtccatagcccagcacttcggcagcggagccatgttgcatgatgtggtcctgggtgtgcccgaaaacgctctgcagcccactcacccagtgtacaacattggaccagacaaggtgatccaggccactacatactttctacagaagccagtcccaggttttgaggagcttaaggatgagacatcggcagagcctgcaaccgactagaggacctgggtcccggcagctctttgctcacccatctccccagtcagacaaggtttatacgtttcaatacatactgcattctgtgctacacaagccttagcctcagtggagctgtggttctcttggtactttcttgtcaaacaaaaccaatggctctgggtttggagaacacagtggctggttttaaaattctttccacacctgtcaa

SEQ ID NO: 411 - DNA, 275 bp, Homo sapiens
agagggcaaggggctggatgcaggcagagaatgactttaagaaaagattctatgatcccttcctttagtatggagctcgattttccagctggcgcttggtgagaaagtacttgaagaactcatagacagaccaagaaatggcggtggagggcatctggtagatgacacgcgcctggatgcctttgaagtagccggccaggccgttgagctggtacaccgtccggaaggcattggccatacccgacagccggccgctgatgttggccagcgagagg

SEQ ID NO: 412 - DNA, 536 bp, Homo sapiens
gcagataagctccgtctgcagttccaggccagccagaaactcctgtgtccacatagagctgacgtgagaaatatctttcagcccaggagagaggggtcctgatcttaaccctttcctgggtctcagacaactcagaaggttggggggataccagagaggtggtggaataggaccgccccctccttacttgtgggatcaaatgctgtaatggtggaggtgtgggcagaggagggaggcaagtgtcctttgaaagttgtgagagctcagagtttctggggtcctcattaggagcccccatccctgtgttccccaagaattcagagaacagcactggggctggaatgatctttaatgggcccaaggccaacaggcatatgcctcactactgcctggagaagggagagattcaggtcctccagcagcctccctcacccagtatgttttacagattacggggggaccgggtgagccagtgaccccctgcagcccccagcttcaggcctcagtgtctgccagtcaagcttcacaggcattgt

SEQ ID NO: 413 - DNA, 286 bp, Homo sapiens
  misc_feature (63)..(63): n is a, c, g, t or u
  misc_feature (121)..(121): n is a, c, g, t or u
ttaatttctgtgaagagtgcccctggtgtttcatcttggcctgttttgatgagaatgttatcntttgtgtctggataacgcgtcagcttcttaaagtacatataaagatattctgtcaccnccccacatgcacacacttttaaaatctatttttattctcttgctaaagttgtaattatgtcaagaattttccagctctaactgccttcttagtacatgtctttctgcctttgaagcatatgagtttgccaaagtcattctcccctaatgacatattgtggactta

SEQ ID NO: 414 - DNA, 166 bp, Homo sapiens
  misc_feature (27)..(27): n is a, c, g, t or u
  misc_feature (74)..(74): n is a, c, g, t or u
gaaagacggaggaaacaatcaaaatcnccattctattgctttgacacctttactaggtgaattggtggcattcncaaagctaatagggacgtttatatcaagaaacatttctgtatatattgttgaattttagttgtacatatactttgtatgtttttgtcttctt

SEQ ID NO: 415 - DNA, 552 bp, Homo sapiens
tgcaggctaggggaggagccacccccgcttccctattgtgaccaggcctatggggaggagctgtccatacgccaccgtgagacctgggcctggctctcaaggacagacaccgcctggcctggtgctccaggggtgaagcaggccagaatcctgggggagctgctcctggtttgagctgcattcaggaagtgcgggacatggtaggggaggcaaaaagccttgggcactaccctccctgtggagctgttcggtgtccgtcgagctagccacaccctgacaccatgttcaagggtaccggaagagaagggtgtctgcccccaacctcccctgtgggtgtcactggccagatgtcatgagggaagcaggccttgtgagtggacactgaccatgagtccctggggggagtgatcccccaggcatcgtgtgccatgttgcacttctgcccaggcagcagggtgggtgggtaccatgggtgcccacccctccaccacatggggccccaaagcactgcaggccaagcagggcaaccccacacccttgacataaaagcat

SEQ ID NO: 416 - DNA, 524 bp, Homo sapiens
acgccgcgcgaaggtgatgagctcgcccggctgccctacctacggacctggttccgcacccgcagcgccatcatcctgcacctcagcaacggcagcgtgcagatcaacttcttccaggatcacaccaagctcatcttgtgcccactgatggcagccgtgacctacatcgacgagaagcgggacttccgcacataccgcctgagtctcctggaggagtacggctgctgcaaggagctggccagccggctccgctacgcccgcactatggtggacaagctgctgagctcacgctcggccagcaaccgtctcaaggcctcctaatagctgccctcccctccggactggtgccctcctcactcccacctgcatctggggcccatactggttggctcccgcggtgccatgtctgcagtgtgccccccagccccggtggctgggcagagctgcatcatccttgcaggtgggggttgctgtataagttatttttgtacatgttcgggtgtgggttctacagacttgtcccc

SEQ ID NO: 417 - DNA, 378 bp, Homo sapiens
aaatgactgcattcgtctcttttttaaaggtagagattaaactgtatagacagcatagggatgaaaggaaccaagcgtttctgtgggattgagactggtacgtgtacgatgaacctgctgctttgttttctgagaagaggtttgaagacattttattaacagcttaatttttctcttttactccataggaacttattttaatagtaacattaacaacaagaatactaagactgtttgggaattttaaaaagctactagtgagaaaccaaatgataggttgtagagcctgatgactccaaacaaagccatcacccgcattcttcctccttcttctggtgctacagctccaagggcccttcaccttcatgtctgaaatgg

SEQ ID NO: 418 - DNA, 116 bp, Homo sapiens
agtatggaagctgagaagagttattggaatcacccccaccgttgacagaggaaggcagggggtgagaattaactgcttgagggtaggagagtctgagatgtgggggccctattccg

SEQ ID NO: 419 - DNA, 147 bp, Homo sapiens
cctgagccaccacgcagaagaggcactttccaagttgtttaccaagaatttacattaaaataacaagctattgtttggctatacattgttctttgtatcacatattccaggaactacaggaaaataatgggtgaggcagctagttag

SEQ ID NO: 420 - DNA, 310 bp, Homo sapiens
gaaattccatcaatacatctagacagatgtttgcttgtagtttttggtatccaaaaccttttttccacacatcgcacagatgccttttttgtaggcacagccctggcagtaatgagaacctggttggtgcacagaacttttacaaattctacaagtggagaacttattctttccatatggatcaaatcttgctttttttgaagtcaaagctttattttcattcagctttcttccaccactttctgtggtattcctagcaccacctttccatgtatctggagtgataacagtaccaagtttcttttcacat

SEQ ID NO: 421 - DNA, 154 bp, Homo sapiens
  misc_feature (68)..(68): n is a, c, g, t or u
agatataactggtagagcacgtcaaagatatacagaaataaccagagaaaagtttgaggcattaaaanaagaaaatatggacctaaacaatatgaatcaaagccttacccttgaactaaacacaatgaaacaagcaatgaaagaactacagtta

SEQ ID NO: 422 - DNA, 444 bp, Homo sapiens
  misc_feature (92)..(92): n is a, c, g, t or u
  misc_feature (264)..(264): n is a, c, g, t or u
tttttgtgcatgattacactccactgacatcttccaagtactgcatgtgattgaataagaaacaagaaagtgaccacaccaaagcctccctnggctggtgtacagggatcaggtccacagtggtgcagattcaaccaccacccagggagtgcttgcagactctgcatagatgttgctgcatgcgtcccatgtgcctgtcagaatggcagtgtttaattctcttgaaagaaagttatttgctcactatccccagcctcaaggagnccaaggaagagtcattcacatggaaggtccgggactggtcagccactctgacttttctaccacattaaattctccattacatctcactattggtaatggcttaagtgtaaagagccatgatgtgtatattaagctatgtgccacatatttatttttagactctccacagcattcatgtca

SEQ ID NO: 423 - DNA, 510 bp, Homo sapiens
  misc_feature (357)..(357): n is a, c, g, t or u
  misc_feature (454)..(454): n is a, c, g, t or u
  misc_feature (462)..(462): n is a, c, g, t or u
gctttggactggctcgcatggaaaaccaggcatttgatcccgagaaagggaacttcaacactttgttttgcaggctctgcgtgctgctgctggtgtgtgccgcccaggcctggctcatgtggcgcttcatccactcccagctgcggcactggcgggaatactggaatgagcagagtgcaaagcggagagtcccagccacacccagactaccagccaggctcatcaagagggaatctggttaccatgaaaatggagtggtgaaggcagagaacggaacctccccacggactaagaaactcaagtctccctaaggccaaagtgctaagaacaggaatcctcttggtgggggccgagcanggggcaaggagcccaggccccctccctgcctcctccttcctgcctgtgatgctccgtctcaaacagccgaaacctgtcttgcaatggggggaggggngcgtttcnctttccttcttcttggcttcctcttattcttccacaaaccattctcaa

SEQ ID NO: 424 - DNA, 191 bp, Homo sapiens
acattgtgcctcaggattttgataataattctggatattggaacagaatagaaatgtactgtcgagagctgacagaaaggtttgaagatgtttgggtggtatctgggcctttgaccttacctcagactagaggcgatggaaagaaaatagttagttaccaggtgattggcgaggacaacgtggcagtcccc

SEQ ID NO: 425 - DNA, 186 bp, Homo sapiens
gcggtgtggaccgaggaacaacttggaagatctacctgcaacacaacatttgtgtcactgtacagttttgtggactgagcgaggaaaaacaacaaataatttaagttggctagagcttctgtattttcaaagactgccacgtgccttaggaatactgttttatctccatactttggatgacttgtt

SEQ ID NO: 426 - DNA, 465 bp, Homo sapiens
gttttggaccaacaagtgcctcctttggtgaaggtgacacatcatgtgacctcttcagtgaccactctacggtgtcgggccttgaactactacccccagaacatcaccatgaagtggctgaaggataagcagccaatggatgccaaggagttcgaacctaaagacgtattgcccaatggggatgggacctaccagggctggataaccttggctgtaccccctggggaagagcagagatatacgtgccaggtggagcacccaggcctggatcagcccctcattgtgatctgggagccctcaccgtctggcaccctagtcattggagtcatcagtggaattgctgtttttgtcgtcatcttgttcattggaattttgttcataatattaaggaagaggcagggttcaagaggagccatggggcactacgtcttagctgaacgtgagtgacacgcagcctgcagactc

SEQ ID NO: 427 - DNA, 480 bp, Homo sapiens
tcctttgtgtagcattatcagcctcggtctggcctctggcacctcacccttgccatggctgaccccacccattccaaggcggggtcacggtaccagcagcacttggggtgaggcctccaaagcttcctcagaattgtggctgtgccacgctggaccacagggtccccctcaagcatctcggggccctattctctctgagcacctggagggctggactcaggcttgtgccagggcctgacttgggcctgggggccctagaacactcctcctcctgagcctactgccaaacgtcctcagtgttgtctgcacctgctccgactccttcagccgccccattcagcgcccgctccgtccagtgcccgccctgtggggccaaggcggccgtgccttactactctgtgtcttctgcctcctctgaggaatctggccctgtctgacagtcccagaccccccgttctctcctctttagttgcatgagtt

SEQ ID NO: 428 - DNA, 533 bp, Homo sapiens
ttcattcacaaacttccgctgtacctgcgtctaaaaaggcccaaacccgagagagacctgatgccggagccccctcactgttcttctccaggaagtggctggggtcggggaacagatgaatatttcatccggaagccgccaagtgattttctcttccccaaacccaataggttccagcctgaactgtctgcccctgatctgcggcgatttatcgatggtccaaaccgggctgtggccctgcttccggagctacgggaggtcgtctcctctatcagctacatcgctcgacagctgcaggaacaggaggaccacgatgcgctgaaggaggactggcagtttgtggccatggtagtggaccgcctcttcctgtggactttcatcatcttcaccagcgttgggaccctagtcatcttcctggacgccacgtaccacttgccccctccagacccctttccttgaagactggagggttgagaccaggccccctgccagttgaagtgagagagtttggtgatactgtcaagccctatcct

SEQ ID NO: 429 - DNA, 486 bp, Homo sapiens
gtgacctttcacgaacatgggcatggctgcggctccctcgtcatcaggtgcatagcaagtgaaagcaagtgttcacaacggtgaaacttgagcgtcatttttcttagtgtgccaagagttcgatgttagtgtttccattgtattttcttacagtgtgccattctgttagatactatccttataattgatgagcaagacatactgaatgcatatttcggtttgtgtatccatgcacctacgtcagaaaacaagtattgtcaggtattctctccatagaacagcactatcctcatctctccccagatgtgactactgagggcagttctgagtgtttaatttcagactttttcctctgcatttacacacacacacacacacacacgcacacacacacaccaagtaccagtataagcatctcccatctgcttttcccattgccatgcgtcctggtcaagcccccctcactctgtttcctggtcagcatgt

SEQ ID NO: 430 - DNA, 97 bp, Homo sapiens
tattagttaattagtgatttcacagtatcctttcgcaggccgatccccactccaaccgttccctcagcaaccccaggggtgtcagacggggcaccct

SEQ ID NO: 431 - DNA, 241 bp, Homo sapiens
  misc_feature (88)..(88): n is a, c, g, t or u
gctgcctttgcactggcgaagggaggggcactggttatgttgtttccattcgacagtccttccaaaggcttccctccagcgccactanccaaatccagaaaagcgtcctcctccagaaggtaccaccaaacctttaaaacctttaaaggctcctccagtgtcagattcaaatccaacatttctgcgctttgctttctttatggctctattcttcaagacttcctcactggccatggagaat

SEQ ID NO: 432 - DNA, 537 bp, Homo sapiens
tgagcctgtgcgttttgcatactgggttggtttgctggggctgcggtgacagcatatgccgcgagctgggctttaacagagatgtgtgctctcacagctttgcaggcgggggtctgagatcagggtgtcgcgggtggggggtcactgctgaggccgtgaggggaatctgctcaggcctgtccctggcttctgggggctgctggtggtattttcagttccttggtgtgtggatacttcgccccatctctgccttcacctgtgtcctccctgtgtgggtgctggtgtccaaaatttccccttttcgtagtgacaccagctgtgttggattggggcccaccctgctccagcatggcctaatcttaactaattacatttgcaaggatcttatgtccacaaaagtcacagtctgaggtgctgggggttaggacttcaatatataaattttgcggttacacaattcaatccatgacagaatccaaaggtttactctggttataaaaacagtacaataaaatattgtttatagccttccctgta

SEQ ID NO: 433 - DNA, 355 bp, Homo sapiens
  misc_feature (56)..(56): n is a, c, g, t or u
  misc_feature (109)..(109): n is a, c, g, t or u
  misc_feature (186)..(186): n is a, c, g, t or u
gaaaacccgttatgagacacaacttgaattaaatgatgaactagaaaagcaaattntttatctcaaggagaaagtggaaaaaatccatggaaactcttcagatagactntcttctattcgtgtctatgaacgaatgccagtggaatccttaaacacattacttaaacagctagaagaagaaaagangactcttgaaagtcaagtgaaatactatgcacttaaactggaacaagaatcaaaggcttaccagaagatcaacaatgaacgccgtacatacctagctgaaatgtctcagggttctggtttacatcaagtttctaaaaggcaacaggtggatcaactgcctaggatgcaa

SEQ ID NO: 434 - DNA, 319 bp, Homo sapiens
ggcaagaagccaggtaaggcatgcagtctttctgttccccgttgggggagtggtattaaggaactgtgtcttcaggatacagtgagctgtaaaaatagacaacaagaacacggaaactatggtagacgaatgggctgaggacacagttcatgaaagagaaatatactcaagatagaagaacctgcttcatcttagtggtgatttttgtaaaatgtaatttaaaatattccccgatgctgggagctaagtaaaaaataaataagtaaataaaatacaaaattacatgtacatttaaatgttttttctctatcaagtttat

SEQ ID NO: 435 - DNA, 511 bp, Homo sapiens
cacgatgaccccagacatgagatccatcactaataatagctcagatcctttcctcaatggagggccatatcattcgagggagcagagcactgacagtggcctggggttagggtgctacagtgtccccacaactccggaggacttcctcagcaatgtggatgagatggatacaggagaaaacgcaggacaaacacccatgaacatcaatccccaacagacccgtttccctgatttccttgactgtcttccaggaacaaacgttgacttaggaactttggaatctgaagacctgatccccctcttcaatgatgtagagtctgctctgaacaaaagtgagccctttctaacctggctgtaatcactaccattgtaacttggatgtagccatgaccttacatttcctgggcctcttggaaaaagtgatggagcagagcaagtctgcaggtgcaccacttcccgcctccatgactcgtgctccctcctttttatgttgccagtttaatcattgcct

SEQ ID NO: 436 - DNA, 515 bp, Homo sapiens
  misc_feature (89)..(89): n is a, c, g, t or u
  misc_feature (91)..(92): n is a, c, g, t or u
  misc_feature (96)..(98): n is a, c, g, t or u
  misc_feature (100)..(100): n is a, c, g, t or u
taagatccagggttccaggactgccaccaactcctgtccagctgctctatccagtgtcccgattcagcaatgtcaaatccctccagcancnntgcnnntnccggatacgacagctcgtcaggatagatcacatcccagatctcccactgcctaaacctctgatctcttatatccgaaagttctactactatgatcctcaggaagaggtatacctgtctctaaaggaagcgcagctcatttccaaacagaagcaagaggtggaaccctccacgtagcgaggggctccctgctggtcaccaccaagggcatttggttgccaagctccagctttgaagaaccaaattaagctaccatgaaaagaagaggaaaagtgagggaacaggaaggttgggattctctgtgcagagactttggttccccacgcagccctggggcttggaagaagcacatgaccgtactctgcgtggggctccacctcacacccacccctgggcatcttaggactggaggggctc

SEQ ID NO: 437 - DNA, 489 bp, Homo sapiens
gctttgaggaaaccactgtgcaacttgagatgtctgtggttgtggggatgttccatccctccgttcagttgtgaagacctctgctctgccctcagcaaccagagcctcgtcactctggacctgggtcagaatcccttggggtctagtggagtgaagatgctgtttgaaaccttgacatgttccagtggcaccctccggacactcaggttgaaaatcgatgactttaatgatgaactcaataagctgctggaagaaatagaagaaaaaaacccacaactgattattgatactgagaaacatcatccctgggcagaaaggccttcttctcatgacttcatgatctgaatccccccgagtcattcattctccatgaagtcatcgattttccaggtgttggtgaactgcctgtgactcctctcctccccggcccctacccctcagggataatgagttcattgctgggctagatgttttagccatgattctgcc

SEQ ID NO: 438 - DNA, 580 bp, Homo sapiens
  misc_feature (275)..(275): n is a, c, g, t or u
  misc_feature (284)..(285): n is a, c, g, t or u
  misc_feature (293)..(294): n is a, c, g, t or u
  misc_feature (303)..(304): n is a, c, g, t or u
  misc_feature (313)..(314): n is a, c, g, t or u
  misc_feature (322)..(323): n is a, c, g, t or u
  misc_feature (327)..(327): n is a, c, g, t or u
  misc_feature (332)..(333): n is a, c, g, t or u
  misc_feature (350)..(351): n is a, c, g, t or u
  misc_feature (369)..(370): n is a, c, g, t or u
  misc_feature (386)..(386): n is a, c, g, t or u
  misc_feature (389)..(389): n is a, c, g, t or u
  misc_feature (408)..(408): n is a, c, g, t or u
  misc_feature (427)..(427): n is a, c, g, t or u
  misc_feature (446)..(446): n is a, c, g, t or u
  misc_feature (523)..(523): n is a, c, g, t or u
agcgagacccagactcgtacaacaaacacctcttcgtgcacattgggcatgccaaccattcttacagtgacccattgcttgaatcagtggacattcgtcagatttatgacaaatttcctgaaaagaaaggtggcttaaaggaactgtttggaaagggccctcaaaatgccttcttcctcgtaaaattctgggctgatttaaactgcaatattcaagatgatgctggggctttttatggtgtaaccagtcagtacgagagttctgaaaatatgacngtcacctgnnccaccaanntttgctccnntgggaagcnngtagtagnnaaantaganncggagtatgcaaggttnnagaatggccgatttgtannccgaataaaccgctcnccnatgtgtgaatatatgatcnacttcatccacaagctcanacacttaccagagaaatanatgatgaacagtgttttggaaaacttcacaattttattggtggtaacaaacagggatacacaagaaactctactctngcatggcctgtgtgtttgaagtttcaaatagtgaacacggagcacaacatcatattt

SEQ ID NO: 439 - DNA, 581 bp, Homo sapiens
gcacggacacctatgaagaccagcagtggagaccccccaagcccactggtgaaacagctgagtgaagtatttgaaactgaagactctaaatcaaatcttcccccagagcctgttctgcccccagaggcacctttatcttctgaattggacttgcctctgggtacccagttatctgttgaggaacagatgccaccttggaaccagactgagttcccctccaaacaggtgttttccaaggaggaagcaagacagcccacagaaacccctgtggccagccagagctccgacaagccctcaagggaccctgagactcccagatcttcaggttctatgcgcaatagatggaaaccaaacagcagcaaggtactagggagatcccccctcaccatcctgcaggatgacaactcccctggcaccctgacactacgacagggtaagcggccttcacccctaagtgaaaatgttagtgaactaaaggaaggagccattcttggaactggacgacttctgaaaactggaggacgagcatgggagcaaggccaggaccatgacaaggaaaatcagcactttcccttggtgga

SEQ ID NO: 440 - DNA, 449 bp, Homo sapiens
ggcgtataattcagccctgtttaaatatacttgcctttcaaattcttcaagtaacatgggaagtattcttgaaatgtcacattttctgccttccctctaagtatgctttctgaagaagtcagggaaagttagagtctgtggcctgaggtgtctgctctgggtggcgatagtgggcacctcaggcaggtcggtgacgtttagcacaggtgccagggctcctgcctgctcctcctgtgttagctctgtgaagttcatttaggaatttttttttcctatgcagtttaagaaataatcctaattgttttttcttattacctaagcaatatatttttattatagcaacctcagaaaagaaaaataaaaggataatttaaaaaactcattcatagtctcagttacccagataacctcggttgtcaccttggagtatcttgttgtagtccctttac

SEQ ID NO: 441 - DNA, 457 bp, Homo sapiens
agcagaggctcatccgggagcagatacgccaggagcgtgaccagaggttgagaggaaaggcagaaaatactgaaggccaaggaacccccaaactaaagctaaaatggaagtgcaagaaggaggatgagtcaaaaggtggctactccaaagacgtcctcctacggcttttgcagaagtatggtgaggttctcaacctggtgctttccagtaagaagccaggcactgctgtggtggagtttgcaaccgtcaaggcagcggagctggctgtccagaatgaagttggcctggtggataaccctctgaagatttcctggttggagggacagccccaggatgccgtgggccgcagccactcaggactgtcaaagggctcagtgctgtcagagagggactacgagagcctcgtcatgatgcgcatgcgccaggcggccgagcggcaacagctgatcgcacggat

SEQ ID NO: 442 - DNA, 498 bp, Homo sapiens
aaggctattaacgacgcgatttcacaaagtcggcagagttctgcgggaaatcccctggaaagactcaattaaagagcagtgaagagagtgcagatcccgtcactggaagttcggaaaatgcagtgtcatcttcagaactgatgtcccagactcccagtgaagttctgggtaccaacgagaatgagaaactgagccctacaagtaatacctcatatagtttagaaaaaatctccagtctggcccctcctagcatggagtactgcgttttactcttctgctgttgtatttgtggttttgaatcaaccagcaaagaaaacctcttggatcatatgaaagagcacgagggtgaaattgtaaacatcatcctgaataaggaccacaatacagctctaaacacaaattaggtggaataatgactcgagcaggaaagcagtagaagaggattccttcaccacagtttcacctttacgctgtcagacaacttcctgccacagaaga

SEQ ID NO: 443 - DNA, 476 bp, Homo sapiens
  misc_feature (73)..(73): n is a, c, g, t or u
  misc_feature (243)..(243): n is a, c, g, t or u
  misc_feature (245)..(245): n is a, c, g, t or u
  misc_feature (269)..(269): n is a, c, g, t or u
  misc_feature (320)..(320): n is a, c, g, t or u
  misc_feature (362)..(362): n is a, c, g, t or u
  misc_feature (370)..(370): n is a, c, g, t or u
  misc_feature (390)..(390): n is a, c, g, t or u
  misc_feature (398)..(398): n is a, c, g, t or u
  misc_feature (419)..(420): n is a, c, g, t or u
  misc_feature (429)..(429): n is a, c, g, t or u
  misc_feature (438)..(438): n is a, c, g, t or u
caaccgagagggccggcaggagcttgaaatcattattggagatgaacacatttcttttacaacatcaaaaatnggttcccttattgatgtcagtcaatccaaggatccagaaggcttatgagtattttattatcctgtccaggaccctgaagtgtttggtcttcagtcttactggattacacttcaagattaaaccaatctaaactgaatattgatgtggacatgggggggtgggagtagttntnaattaccattatcaagaacatttngtgtcagggcagtatatttttataaactatatatgattatctttaataaantatgtgataaaatttaaaaaaagcaaaacaaaacttctagangaataccntcaaaaccttggtgaggganattcttanacagcacaaaaatcattaggnnaagatcaantttaacatngtcaaattaatcaatgacttctcttcctcaaaagacat

SEQ ID NO: 444 - DNA, 133 bp, Homo sapiens
ttccagagctacccagaccatatggtgcacccacagatccagctgcagctggtcctttaggtccatggggatccatgtcttctggaccttgggcgccaggaatgggagggcagtatcctacccctaatatgcc

SEQ ID NO: 445 - DNA, 353 bp, Homo sapiens
cgccgctgcgaattctcggacaaaactgtcaacagcccgggcgcgccttttggctctgcgggtccctctatttatgcaaagccgacctatgctacagccccccaacccccgacctggggtagggaggaagagggtgccggggaagggagtccgccctgtccaggcactagaggctcccttgacgtttggcagatgaaaaacaactaagcctttttgaggtgtagagattctcaggtccaggcgttaaaaaataatggtcaaaagaataatacaaaaatagtaaaggtcttgaagaatgccagcgaagcaattcttttttatttgaggacacttgtctggtgtactttttcatg

SEQ ID NO: 446 - DNA, 416 bp, Homo sapiens
  misc_feature (275)..(278): n is a, c, g, t or u
gaggaagatatcctggctggcactctttcagttgacagagagtgacctcaggctggggcggctcctcctccgtgtggccccggatcagcacaccaggctgctgcctttcgctttttacagtcttctctcctacttccatgaagacgcggccatcagggaagaggccttcctgcatgttgctgtggacatgtacttgaagctggtccagctcttcgtggctggggatacaagcacagtttcacctccagctggcaggagcctggagctcaagggtnnnncagggcaaccccgtggaactgataacaaaagctcgtctttttctgctgcagttaatacctcggtgcccgaaaaagagcttctcacacgtggcagagctgctggctgatcgtggggactgcgacccagaggtgagcgcc

SEQ ID NO: 447 - DNA, 409 bp, Homo sapiens
gctccccacatgctggtggtgtactctgctaatggagagatgtttaaactgagagctgctgatgcaaaagagaaacaattctgggtgactcagcttcgagcttgtgccaaataccacatggaaatgaattctaagagtgctccaagctcccgaagccgaagtctcactttgctcccacatggaacacccaattctgcgtctccctgtagccagagacacctcagtgtgggggcccccggtgttgtcacaatcacgcatcacaagtcgcctgcagccgcccgaagagccaagagtcagtattccggccagcttcacgaagtcagagaggtacacactctcctgacagaggaaagctgtttgctgcactggtttactggatagattaactgggttgaggctgtgtaattta

SEQ ID NO: 448 - DNA, 316 bp, Homo sapiens
gaggggcacatgcaagtcaccaaagtgggaagccttcaccaaggccacacccaaagtctactgattgtctgtccaaagttcgttgattcctggccatgaacaagcacaatagaaaaagacacagggtcctagtggctacaagtcaatgtgaattggcacatggtctagcagttttaaaatctgacagtagagtatggcaatgggcaagggccaagaagtcctgagatgggaggtcagcgctctaactgggctcagtggaggtctgtgaccagtgtctggacactagctacaggggaccgggcagaggattctgggc

SEQ ID NO: 449 - DNA, 473 bp, Homo sapiens
  misc_feature (241)..(241): n is a, c, g, t or u
  misc_feature (341)..(341): n is a, c, g, t or u
  misc_feature (384)..(385): n is a, c, g, t or u
  misc_feature (417)..(417): n is a, c, g, t or u
  misc_feature (420)..(420): n is a, c, g, t or u
  misc_feature (427)..(427): n is a, c, g, t or u
  misc_feature (430)..(430): n is a, c, g, t or u
gcactttagtgattgcttttattacattagttaagatgtcttgagagaccatctcctatcttttatttcattcatatcctccgccctttttgtcctagagtgagagtttggaaggtgtccaaatttaatgtagacattatcttttggctctgaagaagcaaacatgactagagacgcaccttgctgcagtgtccagaagcggcctgtgcgttcccttcagtactgcagcgccacccagtgnaaggacactcttggctcgtttgggctcaaggcaccgcagcctgtcagccaacattgccttgcatttgtaccttattgatctttgcccatggaagtctcanagatctttcgttggttgtttctctgagctttgttactgaaatnngcctcgtggggagcatcagagaaggccaggangantggtgtnttnccctagactctgtaaccacctctctgtctttgtccttcctgag

SEQ ID NO: 450 - DNA, 512 bp, Homo sapiens
  misc_feature (363)..(363): n is a, c, g, t or u
gggaagtaggtgatgccagccctcaagtctgtcttcagccagggacttgagaagttatattgggcagtggctccaatctgtggaccagtatttcagctttccctgaagatcaggcagggtgccattcattgtctttctctcctagccccctcaggaaagaaggactatatttgtactgtaccctaggggttctggaagggaaaacatggaatcaggattctatagactgataggccctatccacaagggccatgactgggaaaaggtatgggagcagaaggagaattgggattttagggtgcagctacgctcaccctaaacttttggtggcctggggcatgtcttgaggcccagactgttaancaggctctgctggcctgtttactcgtcaccacctctgcacctgctgtcttgagactccatccagccccaggcacgccacctgctcctgagcctccactatctccctgtgacgggtgaacttcgtgtactgtgtctcgggtccatatatg

SEQ ID NO: 451 - DNA, 397 bp, Homo sapiens
gtgaacatttcaaccagccttatagctgttctcatcatcaccttctgcattgtgaccgtgcttggaagggaggctctcaccaaaggggcgctgtgggcagtctttctgctcgcagggtctgccctcctctgtgccgtggtcacgggcgtcatctggaggcagcccgagagcaagaccaagctctcatttaaggttcccttcctgccagtgctccccatcctgagcatcttcgtgaacgtctatctcatgatgcagctggaccagggcacctgggtccggtttgctgtgtggatgctgataggcttcatcatctactttggctatggcctgtggcacagcgaggaggcgtccctggatgccgaccaagcaaggactcctgacggcaacttggaccagt

SEQ ID NO: 452 - DNA, 426 bp, Homo sapiens
  misc_feature (32)..(32): n is a, c, g, t or u
gactgtaggtgcgtgggagaaactttgcaggntggggacccggcggctgctggccggtagtgactggtgggcgcgctcgaggactccaaggggcgcagcccgggggcagacccttgggtcgggcggggatcttacgcttcccttacccgcccccttttgtctttcacctcagccccgccggctgctgtgggagcggcggccgtccctctcctggaggtcgtctcctggcatcctcggggccgcaggaaggaagaggaggcagcggccggagccctggtgggcggcctgaggtgagagcccgaccggcccctttgggaatatggcgaccggtggctaccggaccagcagcggcctcggcggcagcaccacagacttcctggaggagtggaaggcgaaacgcgagaagatgcgcgccaagcagaaccc

SEQ ID NO: 453 - DNA, 384 bp, Homo sapiens
ctaaagaaagtacacacactctctcgctctctctcggtcttataaaactcgttggtgtcttataaaacaaacagtgataatctcaagttagaaaacagtaggtcctgagaaccataagaaaaatgactggtgtgatgttgagtaacaagttggtacagttactttagctatttattaacttgctcatctcatagaacattttaatagatttttcacacacctcattattaaaaaaaaacaaacatgctggtgtcttggttacccattattcctctgtacctgaattcaggttggtttttctatttggaaaagactttataaatgttggcttaaaaagaggttgagcaccagaatctcagaatttaccaccaaagaactcatcca

SEQ ID NO: 454 - DNA, 407 bp, Homo sapiens
agcataatgaagcctgcatgtgcccagcttcaataattaccaatatcttgccagttttgtttcgtttctcctttgattctctgtattgagcaagtcttagacatcatacgtttcccgcgtaagtaccttattctacatcattaaccagtaaggactttttaattaaccacaataccactatcacacctaataatagtaattccttatggatcttttctttagacctatttttgaaggcataaaagcagttgagtttctggagaatttttggatggtgattaatgacttgactggctgctcttcccagagctgtggcagctctccccccgtagaagatggggtttgtattggcgcaccaagatctccaacagccagtgtgtgtttcccatttcctgtaggttccatca

SEQ ID NO: 455 - DNA, 223 bp, Homo sapiens
tagtcagagtgacccatgtatctgggaagactctagtctggactgtggcccagcttggggaccttgtgtgctcagatcatcttcaggaaggaaaaggcatcctggagacaggagtccattcactcctctgctctctacccactcatttgcttgccaaacttagctttgccagtgatagtcaatattaaagtgtacttttttcccctttaatccaatatagttg

SEQ ID NO: 456 - DNA, 160 bp, Homo sapiens
tataattataaccttaccgcatggacagttttgaatcctatgctaattggggtaattaagtcaattatttcatatgttatgttctcttcatgtgcatttttcaatgatatattatgttccattgtgttggaatgtgaatgttcaattacttttccctata

SEQ ID NO: 457 - DNA, 465 bp, Homo sapiens
ccacatccatggcctaggagctactgggcaggttcccggccacacatctggtgggctgttttgtttttttttttcctcttcccccagatgtcttgacgggatcactggggctctttgtgagtgagggtggccaaactaccgccggaggagatggggtctcagagcgagagctgcggagggggaggggaagaagaaggcctcacttttgctgctgcggggcccacacagccgctgctactttggggggtggggaaggggccaagctgcagacacacacagtcattcatttctgtccacacccctgtgggtggcgggtgtgcgtgtgtgtgcttgtgtgtgcgcacgtgtcggcgctcacacacacatgctagcccactgatgcacccagcccagggctggcagtctttgcagcgtggggccgtctcaccctggagcctggagaggatctatgcttgtttgtttttg

SEQ ID NO: 458 - DNA, 212 bp, Homo sapiens
  misc_feature (122)..(122): n is a, c, g, t or u
  misc_feature (158)..(158): n is a, c, g, t or u
gtgccgctggcacccgggaagacgctgggggccggcgctgtagagccgggcatgggctgggatgtgtttggattccaatccgggcctgacaccagttcagtgacctcgggaagttccccaancctccgggcctgtttcctccctctgaagtggcgacnagtagtagaaccgacctcgtaggctcatcgggaggtcctgatgggagaacccat

SEQ ID NO: 459 - DNA, 342 bp, Homo sapiens
  misc_feature (161)..(162): n is a, c, g, t or u
ggttgtactcaagatgttttcctggaaaaattcattctgctttctgaccaggatttccagaaactctgacccttctaagaggtctgggtggaattgtgatggtgattctgctagtagacagtgtaacttctgcgtctacaaaaagaggataggccgtcacnnctcacatggctttgcgtgaaagcccaatggtactgtctctatggcagagatgaggaaggaacaccagcgtcctccaactttcctgttcttcctttgggttaatggccactgtaaggaaacagttttctgccacgtgtggggtgatttgaatgtaaaatgcccaactctcatagcaggctg

SEQ ID NO: 460 - DNA, 519 bp, Homo sapiens
aaggggaagatttgctgctgctgccgggccaagttcccgctgttctcgtggccgcccagctgtctcttctgcaagagagccgtctgcacttcctgtagcataaagatgaagatgccttctaagaaatttggacacatccctgtctacacactgggctttgagagtcctcagagggtatcagctgccaaaaccgcgccaatccagagaagagacatctttcagtctctgcaagggccacagtggcagagcgtggaggaggcgttcccccacatctactcccacggctgtgtcctgaaggatgtctgcagtgagtgcaccagctttgtggcagacgtggtgcgttccagccgcaagagcgtggacgtcctcaacactacgccacgacgcagtcgccagacccaatccctctacatccctaacaccaggactcttgacttcaagtgacagccccaggtggccaggcctccaggaggcaccaggcaggccctgtatcaggctaggacgctctgagctgtgcat

SEQ ID NO: 461 - DNA, 208 bp, Homo sapiens
tcccccctctgaattttactgatgaagaaactgaggccacagagctaaagtgacttttcccaaggtcgcccagcgaggacgtgggacttctcagacgtcaggagagtgatgtgagggagctgtgtgaccatagaaagtgacgtgttaaaaaccagcgctgccctctttgaaagccagggagcatcattcatttagcctgctgagaaga

SEQ ID NO: 462 - DNA, 532 bp, Homo sapiens
ctcagcatttagtgaaggtaattccaaaatactggtatcagtactcttatttataagtgtacggaatgcataacatgaacattagtcaaagaacttttaatataattcactttttaagtgttaaaatttaaaggtcaagtaaaattgtaaatttgtaatatggaaacattaagcgtcattatcatacaaattattagcagataaccttaataaaaataaacgtttgcgggttttttttgagacagggtctcgctttgtcacctaagctggagtgcagtgcgcgatctcggctcactgcaacttccgcctcctgggatcaagtgattctcctgccttagcctcctgagtatctgggtttacaggtgtgtaccgccacacccgtctctactaaaaatacaaaaaacaaaaaaagattagctgggcgtggtggcaggtgcctgtggtcccagctgctcgggaggctgaggcaggagaatagcatggacctgggaggcggagcttgcagtgagctgaaatggtgccactgcactcc

SEQ ID NO: 463 - DNA, 542 bp, Homo sapiens
attatcgatcatgtctattgctccccgtcccttcgctgcgttcagactgcacacaatatcttgaaaggtttacaacaagaaaatcacttgaagatccgtgtagagcccggcttatttgagtggacaaaatgggttgctgggagcacattacctgcatggatacctccatcagagttagctgcagccaacctgagtgttgatacaacctacagacctcacattccaatcagcaaattagttgtttcagaatcctatgatacttatatcagtagaagtttccaagtaacaaaagaaataataagtgaatgtaaaagtaaaggaaataacatcctgattgtggcccacgcatcttcccttgaagcgtgtacctgccaacttcagggcctgtcacctcagaactccaaggacttcgtacaaatggtccgaaagatcccatatctgggattttgttcctgtgaagaattaggagaaactggaatatggcagctgacagatccaccaatccttcctcttacccatggaccaactgggggcttcaactg

SEQ ID NO: 464 - DNA, 451 bp, Homo sapiens
  misc_feature (368)..(368): n is a, c, g, t or u
cagccccatgacagcgaagggacctttctgtccccgcccctgtccctgtgctgggcccacgtactcacccacgtactggtgcccggctcccctgggcacccagagccccccagataggccggtggaggaggtggaggagctgtccccccaaaactactggcctgtggtctggactccagggccccatttctgatgtcgccaggtgtgcctgagcccatcggggccaggcctgaggaagtgtttcttgggaggatgggatgaccccctgttcccaagagatggcagcacagtggaggccatggtggaaaaggccctgccatggggtccttgagggccaggacagcctgagggagggatggtggccactncccacaaggggcctggtgggaacgggtcccaggacagactcatagctagaccccgttggcggcctctgtgttgaaccagaact

SEQ ID NO: 465 - DNA, 467 bp, Homo sapiens
ggccccaggcagttttatgatgacacctgtgttgtcccagaaaaattcgatggagacatcaaacaagagccaggaatgtatcgggaaggacccacataccaacggcgaggatcacttcagctctggcagtttttggtagctcttctggatgacccggcaaattctcattttattgcctggactggtcgaggcatggaatttaaactgattgagcctgaagaggtggcccgacgttggggcattcagaaaaacaggccagctatgaactatgataaacttagccgttcactccgctattactatgagaaaggaattatgcaaaaggtggctggagagagatatgtctacaagtttgtgtgtgatccagaagcccttttctccatggcctttccagataatcagcgtccactgctgaagacagacatggaacgtcacatcaacgaggaggacacagtgcctctttctca

SEQ ID NO: 466 - DNA, 405 bp, Homo sapiens
  misc_feature (162)..(162): n is a, c, g, t or u
  misc_feature (301)..(301): n is a, c, g, t or u
catacacctattaccatacaggggaagtccccaagctctccggcctcacagactctcacccacgggcagagcattcttggctgattgaggggaagttccagcaatcagcacaagtgttctttataccccaaatcactaaaacatatagaggggtctatgtcngtttcatccataactcagccactggtggaacaaatctcataatcaagaggatcatagtccctggtaagtggatccctggagcattggcaccatgttttccagtaaagtctatctagctgtcagggaagagccacctgcnctctgcaaagggagagggaaaatcaaaacccaggaaagggaatatgtttctgctccaaaaccaccagcttctgcctgtccccttcactctttctagatcattct

SEQ ID NO: 467 - DNA, 110 bp, Homo sapiens
gaaagagcgagagaaggggaaagacaagtcgggagaggccggtaggcgtgaggcgggcctgaagcggcagcgggcggccttcgtccggcgagagctaggccgaggacccg

SEQ ID NO: 468 - DNA, 204 bp, Homo sapiens
ctgccccccagggctagtgaagtggcctcttggataccagctcaggggacactggccccacaggagttgtgagccctctagggcagggtgggagccgggaccctcaggtgtagctgagctgtgacattgctggtcatccttggtgctcttgcttttttgaaagatgctttttttttttttaactgacgtagaatgaagaactgc

SEQ ID NO: 469 - DNA, 139 bp, Homo sapiens
tcagataggaaggatggatatgtctttatctacagcagaagttagttaccctttcatgaggtgattagtttacttctaggtggaaaaagagaggactttgaacttggtgttgtcacaggagctgctctcatggacaaga

SEQ ID NO: 470 - DNA, 115 bp, Homo sapiens
  misc_feature (81)..(81): n is a, c, g, t or u
ctcagagattactcagccagacagagatattccactggtgcgaaagttacgttccattcacagctttgagctggaaaaacntctgaccctggagccaaagccagacactgacaag

SEQ ID NO: 471 - DNA, 475 bp, Homo sapiens
cagcgcctccggttataagttgaagaaataagaccagtttccaaataaatgacaaagagcttggtattcctgcaggcatcagaatcacctggaggaggagatgctgctgctggtggtggcccagagaccacacattgagaaccactgctctagaaaaccatttgtctttgctgatggagaaacctggctctaatagaagggcttgtatgtgtccaggaagtctagtgaattcgaccatgaatccagacatggccagtggctaaatcctgtgggaagacactgtgcttctctctgacccatgaacactctgctagtcaagctctctgtcacaaagacaacttgaagagacagagtggacctcacagaagataccatcgtcactcttaccaatgcaactgtggtgaacaggaccactattattccttagatcaaaaggacagcacattcaacagcatcctcatggcatgccagcaat

SEQ ID NO: 472 - DNA, 446 bp, Homo sapiens
cggcttgttgggaccaccaaccaaggggaccagcgcatcctgcgcagcagcgcccctccctccctggctggccctgctgttagtcacagaggccgcaaggccaagacgtgagtgggctgcccctccacctaggctttccaccgtggccactccctccatgaccaggcctgactctgttaaccactacttgaagtcttgagggggaaagcctccagggagacataggggccttctcccttcttcccaccaaagtagggggtaggcaactggttgtcatggaaatggggatcatcacagtccccttccccttcaccccacgtggctgggcagtgttaagggtggcaagatagtctctgtccccacccccttgtacttgattccccagctgtctttcacacagccccccacccttaggggaagggggaggggcttctctacaatgaggt

SEQ ID NO: 473 - DNA, 443 bp, Homo sapiens
gagacttggtggtctgagctgtcccaagtcctccggttcttcctcgggattggcgggtccacttgccagggctctgggggcagatttgtggggacctcagcctgcaccctcttctcctctggcttccctctctgaaatagccgaactccaggctgggctgagccaaagccagagtggccacggcccagggagggtgagctggtgcctgctttgacgggccaggccctggagggcagagacaatcacgggcggtcctgcacagattcccaggccagggctgggtcacaggaaggaaacaacattttcttgaaaggggaaacgtctcccagatcgctcccttggctttgaggccgaagctgctgtgactgtgtccccttactgagcgcaagccacagcctgtcttgtcaggtggaccctgtaaatacatcctttttctgctaacc

SEQ ID NO: 474 - DNA, 465 bp, Homo sapiens
cctaattcacacaaagactccttgtggactggctgtgcccctgatgcagcctgtggctggagtggccaaataggagggagactgtggtaggggcagggaggcaacactgctgtccacatgacctccatttcccaaagtcctctgctccagcaactgcccttccaggtgggtgtgggacacctgggagaaggtctccaagggagggtgcagccctcttgcccgcacccctccctgcttgcacacttccccatctttgatccttctgagctccacctctggtggctcctcctaggaaaccagctcgtgggctgggaatgggggagagaagggaaaagatccccaagaccccctggggtgggatctgagctcccacctcccttcccacctactgcactttcccccttcccgccttccaaaacctgcttccttcagtttgtaaagtcggtgattatatttttgggggct

SEQ ID NO: 475 - DNA, 443 bp, Homo sapiens
agaatgcaaagaggccgcttccctaagaggcttggaggagctgggctctatcccacacccacccccaccccacccccacccagcctccagaagctggaaccatttctcccgcaggcctgagttcctaaggaaaccaccctaccggggtggaagggagggtcagggaagaaacccactcttgctctacgaggagcaagtgcctgccccctcccagcagccagccctgccaaagttgcattatctttggccaaggctgggcctgacggttatgatttcagccctgggcctgcaggagaggctgagaccagcccacccagccagtggtcgagcactgccccgccgccaaagtctgcagaatgtgagatgaggttctcaaggtcacaggccccagtcccagcctgggggctggcagaggcccccatatactctgctacagctcctat

SEQ ID NO: 476 - DNA, 458 bp, Homo sapiens
gactcagtgggcactagaacgcctgaggctgcagctgggctccccggggtccttgcagaggaaactcagtctgctggagcaggaatcccagcagcaggagctgcagatccagggcttcgagagtgacctcgccgagatccgcgccgacaaacagaacctggaggccattctgcacagcctgcccgagaactgtgccagctggcagtgagggctgcccagatccccggcacacactcccccacctgctgtttacatgacccagggggtgcacactaccccacaggtgtgcccatacagacattccccggagccggctgctgtgaactcgaccccgtgtggatagtcacactccctgccgattctgtctgtggcttcttccctgccagcaggactgagtgtgcgtacccagttcacctggacatgagtgcacactctcacccctgcacatgcataaacgg

SEQ ID NO: 477 - DNA, 475 bp, Homo sapiens
  misc_feature (342)..(342): n is a, c, g, t or u
agcatcctgaaccagctgtgttttattatgcacagatatcgtaaaaatttgactgccgcaaagaaaaatgagttggtacaaaagacaaaatcagagttcaatttcagcagcaagacttatcaagaatttaattactatttgacatcaatggttggttgcctgtggacgtccaaaccctttgcgaaaggaatatatattgaccctgaaatcctagaaaaaactggagtggctgaatataaaaacagtttaaatgtagtccatcatccttctttcttgagttacgctgtttcctttttgctacaggaaagcccagaagaaaggacagtaaacgtgagctctatncggggaaagaaatggagctggtatttggactatttattttcacaggggttacaaggcttgaaactttttataagaagtagtgttcatcattcttccattcccagagcagagggcataaactgcaacaatcaat

SEQ ID NO: 478 - DNA, 490 bp, Homo sapiens
ctcgcagagttccgtcgatcaggactggaggaagccacgtttcaacagatatatagtcaacatgtggcactgtgcagaatggagggactgccgtaccccaccatgtcagagaccatggccgtgtgttctcacctgggctcctgtcgcctcctgcttgtggagcccagcaggaacgatctgctccttcgggtgcggctcaacgtcagccaggatgatgtgctgtatgcgctgaaagacgagtaaaggggcttcacaagttaaaagactggggtcttgctgggttttgttttttgagacagggtcttgctctgtcgcccaggctggagtgcagtggcacgatcatggctcactgcagccttgacttctcaggcttaggtgaccccccaacctcatcctcccaggtggctgaaactacaggcacatgccaccatgcccagctgattttttgtagagacagggcttcaccatgttgccaagctagtctacaaag

SEQ ID NO: 479 - DNA, 460 bp, Homo sapiens
  misc_feature (72)..(77): n is a, c, g, t or u
  misc_feature (364)..(364): n is a, c, g, t or u
ttttttagggactctcaacctcctggcagggttaaagggagagtactttaaacccatataccagctgtgctnnnnnntctctcactttgccctgggtaagctgctgtagggtcagaagtaaccctttctgtgccagttgagaatgagcctgtgtggtagctgatgtcagaggacaaagctctctgcaagggctggacacagagctgcagagtcctgaacatccctcctttcaggctgcagaagggagaggcaatgaagacaggtgctccggaagcagcatcagggctcttggaggggactggtggggactcaggctgggtgcagcctccaaacagagaacggaacttaggtgtgtctctacagnctaggcccagcctagcccagcccagaacaaacacccttcagagcctaaccaaagaacataagctgcaaaatgtgcacccatattttaagctgcttt

SEQ ID NO: 480 - DNA, 492 bp, Homo sapiens
  misc_feature (77)..(77): n is a, c, g, t or u
cctgtctcctacatttagccaatgaaaagaatctaaaactggaaggaacagaggacctctctgatgttcttgtgagncaaggagattgagttcactatggagaagtcagcagcaggaggcccatcccttactcagttgccgggacatccccagtctcgggggaagaagatgccatgggcttatacccaggctgtagccaactaccaacgtgcctgtttgtttgttgctctttccttctctccatcatagtctgggtgccagcgccctgaagctccgtgctcaactgattaaactttactgccctatggtgaccatctaggagaggggagggcagagggggtgagggtactattctggattgagaaaacctatatccattctttatatcaatgtatagttttagtctcctaaattgatctgttattttccaaactattctcttgtagaaaattttccagtgggcacttaatggtgcccttgaagaacttccta

SEQ ID NO: 481 - DNA, 501 bp, Homo sapiens
  misc_feature (197)..(197): n is a, c, g, t or u
  misc_feature (247)..(247): n is a, c, g, t or u
ggagggagaggtccctgcaaggtcccttcccgggcaggggagggatggaaatgccgtcacagtagtagggactggagcgtctacaaggatggaggggagctactcaggcctaacgttagctacaaggaaaaaggacgccttccgtgacagatccttgaggtgtctgtgtctgccccaagtggccggcagtggccttncctccgggcccaaggcctgcagccacctgctctaactcttgagtgggggngcggggggggacctgcaggggctcggggacaggacagcagcaagaggcaggggccgaggacggaggccttcccgacagtggggtgggttgtacattcaagtgtgaggtgaaccctttggtggggagggggcccctgaagcctcggcggggccacccctccccgcggcgcctctgagtctagggagaggggctgctggctcggcccggccggcctggcttcacagagggtctgcggattgacactggttcttttc

SEQ ID NO: 482 - DNA, 490 bp, Homo sapiens
  misc_feature (120)..(120): n is a, c, g, t or u
  misc_feature (122)..(122): n is a, c, g, t or u
  misc_feature (185)..(185): n is a, c, g, t or u
  misc_feature (271)..(271): n is a, c, g, t or u
  misc_feature (306)..(306): n is a, c, g, t or u
  misc_feature (313)..(313): n is a, c, g, t or u
  misc_feature (352)..(354): n is a, c, g, t or u
  misc_feature (357)..(357): n is a, c, g, t or u
  misc_feature (359)..(359): n is a, c, g, t or u
  misc_feature (361)..(362): n is a, c, g, t or u
  misc_feature (365)..(365): n is a, c, g, t or u
  misc_feature (367)..(367): n is a, c, g, t or u
  misc_feature (371)..(371): n is a, c, g, t or u
  misc_feature (373)..(374): n is a, c, g, t or u
  misc_feature (376)..(377): n is a, c, g, t or u
gtgaggagctgttttcatctgtgtctgttggagatcaagatgattgctattccctgttagatgatcaggacttcacttcttttgatttatttcctgaggggagtgtctgcagtgatgtcncntcttctattagcacttactgggattggtcagatagcgagtttgaatggcagttaccaggcagntgacattgccagtgggagtgatgtactttctgatgtcatacccagtattccaagttcaccttgcctgcttcctaaaaagaaaaacnagcaccggaatttagatgaactcccttggagtgcnatgacanatgatgagcaggtggaatatattgagtatctgagtcggnnngtnantnntgngntggncnncnntactgtcctgtggtctagtgggcagggacctgggggccatcagtggctgtaggacttttttacccctctgttcctggcctaaatatgtgatgggtatgcttcaccttaagtgg

SEQ ID NO: 483 - DNA, 231 bp, Homo sapiens
  misc_feature (63)..(63): n is a, c, g, t or u
ctttcacactgtggcagcccagtgaagcagactgggccatgaactctcctagccctggggccnagcctgttccacaggcacccctgcaggaggcgctgccaggagagccttccatctcggggctctttgaggttccctccttctgggtgttcttcaggctgagcagagaggctcctgtaccctctctctcggaatctgaagagccagatttaggccgggcaaaggggctca

SEQ ID NO: 484 - DNA, 414 bp, Homo sapiens
ggtgctggaaaaactactatcttgtttaagttaaaacaggatgaattcatgcagcccattccaacaattggttttaacgtggaaactgtagaatataaaaatctaaaattcactatttgggatgtaggtggaaaacacaaattaagaccattgtggaaacattattacctcaatactcaagctgttgtgtttgttgtagatagcagtcatagagacagaattagtgaagcacacagcgaacttgcaaagttgttaacggaaaaagaactccgagatgctctgctcctgatttttgctaacaaacaggatgttgctggagcactgtcagtagaagaaatcactgaactactcagtctccataaattatgctgtggccgtagctggtatattcagggctgtgatgctcgaagtgtt

SEQ ID NO: 485 - DNA, 508 bp, Homo sapiens
tcctctgtcctctatattcagcatgttccttgtcagctgctgggccggccctgccttgcgctagcagagcctctcctggcagcttctcaggtctccctaatggagacaccaggctactaggacactggctggggccaccccctcctgcctaatgcctcaccttacagctggggaaactgaggcctggaatggcccagagtcaccaaggcaaagttggggctggtcccagcctgaggctccagctgatgccctcagctcccagagagggggtgccccatctagctgggtgcaggggtcactgcttgtcagctcagggccctgtgcccgcttgcctgttcccctacatctgtgcctgcacatccagaactgcctccttgccgctgcctccaggaagcccaccttgagccagagtcaagggctgcagcactgcccgatagaacacgcccgccctcactgctgttcttgccttacagccaccatgggaaagctgcaacctttctgttttatt

SEQ ID NO: 486 - DNA, 555 bp, Homo sapiens
  misc_feature (400)..(401): n is a, c, g, t or u
  misc_feature (410)..(410): n is a, c, g, t or u
tgtcaacttgtcatatacacctccagggaccaaaaacaaaagcagctcggagtctgtgttgcctgattggaaagtagaagctctggtgtatgctacagcacataacacatttttactaaaggaaaaaagctaattatgtccatgcctctcgtaaaactggggggaaccttaaagagaaagaactaaggcttaagttatctgtagtataatcaattagaagtaatgaatggatgcatgtaaaatggatgtgattttttttcaagcttattttgaaatcttaaaaatcaggttacaccatagctactcaaaagttttacacacttaaaactcagatcagtaagtgttggtaccttttagactcataaaattgaataaaccattgcaatgctttaaaaaaaannaaaaaaaanggttttattgctatgattttatggcagacacatccaagcaaaaccattttccaaatgcagaccttcctgatgttatctgaaatctgataaaatgaccctactctctgctgtggttcattcttgctccatgctgtccatatttatg

SEQ ID NO: 487 - DNA, 541 bp, Homo sapiens
gtggcacttaggcactatattattgatatctacaatggcctcctggatgcacaaaagaccctgaagggcttttttgatcagcaaaacaaaaacagaaaagcaaaaaacagttaatttttgtttggtcaagtttactcaaccagaccaccttgataccaacaatgctggagagcatttggcaagagcagggccacaatgccaaattccttggaaaggtagacttcctatgatactttcatggattggcaaatttgtggggtttttttggtagtagcttttgagaatgttagtttctggctggggtagtgacttacatctgtaatcccagcacttcgggaggcgaaggcaggtggattgcttgtgcccaggagtttgagaccagcctgggtaacatggtgagaccccatctctatttttataaaattaaaaaaaaaaaaaaagatagagaatgttactttcctataaagccatgataccctaagtactaagacatgtctgttgttgtcctttccttcataacatttctcataacccgtaattt

SEQ ID NO: 488 - DNA, 523 bp, Homo sapiens
  misc_feature (86)..(86): n is a, c, g, t or u
  misc_feature (106)..(106): n is a, c, g, t or u
  misc_feature (140)..(140): n is a, c, g, t or u
cagccctgacgtgaactcattttattttggccaggacccagaaaggagtctactgctaagatttcagcatgtcctgtggctgagtnaatcagagttatgacagganggtaccgggcacaccatcgcaatgctccatcaangctagtatgttgtgttctttccttcatatcaagtcaactcaagcttgctctacttacctggtgtacacagtctaagaactgtaagaagactggagcaaaaccactcccctgacagttgagggtcaagctgctcctctgactgaatttgtgaccaaaagagagccactctttttcaaccaacatctggaagccttcaagtgtcctataaaagggatcactgagtaactgaaccagggatgtcacctagggcataagcaggatggattgtcattaattttagttctgaaaaaggcctattactaagataaaagcacttccttctgatgatagctaattcacaaatttacctggacagcaaatttgttcactaaccattccaggat

SEQ ID NO: 489 - DNA, 306 bp, Homo sapiens
cggctgtacgactccataatgggcatggggactcaagataaggtcctgatcagaatcatggtctcccacaatgaagtggacatgttgaaaattaggtctgaattcaagagaaagtatagcaagtccctgtactactatatccagcaagacactaagggtgctgtacctgtgtggtggagatggctgaagtccgacacagcacgagcgtccagaaatggtgctccccatgcttccagctaacaggtctagaaaacccgcttgtgactagcagtccctgtggctgttcctgtgaggatgacgttagca

SEQ ID NO: 490 - DNA, 170 bp, Homo sapiens
agaagattcccttgaagccttctccttccaaaaagtttcggtctggctcatctttctctcggcgagcaggctccagtggcaactcctgcattacttaccagccatcggtctctggggaacacaaggcacaagtgacaacaaaggcagaagtggagccaggcgttcacctt

SEQ ID NO: 491 - DNA, 532 bp, Homo sapiens
tgggggtgactgctgcttattaagatgattcatttcatttccactcgtggttgtgattttcaccttctcaaaactgagtcagcaagagaaaatcttgtcttagaagggccagataacacttcgctgtgagaacaggagggataatggattggagatggctatgtgtaaagcagccctgcctgctgatttaacacactttcaaaatagatgtgtcagtattcatttaaagcaagactctgatgacagaaggaaccttgaaaactacctgatattgaaatggttgtgccctttatagcccttttgcatctccttgactttccagtcatgcctcctaaatcagaagaaaagctgcaaagaaaatgttttgtgtggttctgggcttatttgaataatgttcatgaccacaggctgccatagcacaagtgagaatttcagaccacaagggtttaaggagcagtgctctcttctctcaaagctcagaacggtctctggatccatggtatcgtacacccagtgtggatattaacattct

SEQ ID NO: 492 - DNA, 559 bp, Homo sapiens
  misc_feature (232)..(232): n is a, c, g, t or u
  misc_feature (259)..(259): n is a, c, g, t or u
aagggaagttagcaccttcctcttggaggtgctgaggattaaatgagataatacgtggaaagcattaggcatgtagcacagttagcagatggtggttggctccctctgcttttccatcagtctgtggcctagtttaaatggtgggaggaagggtgtgagatttaaggctggttgtaagggatcagtcagtgtagttggaaaaattgtaagatgaagttataggatatagacncaaaccttcctggaaggccagaaagtntgcatagcttcaataaaggatttggctgaaagcagcgtaatcccctttaccttgagttgatagcaatagagcaaataacatgggaacgtgggggagtttattgaatagcttgtttactcatgtggtcctaagaccaacctttgattatccacgggtgcatgattgctctctactcggtggtcggcaaatttaattacccacaggtgtgttgactcaaagcctctgtcattaaatctatgctgaataaatgccgtcaggccagctagtcaaggtgcacaactctttttgtgcgtggtgtgg

SEQ ID NO: 493 - DNA, 287 bp, Homo sapiens
gtaagtctcagtcctttaaaactcagaaaaaggtgtgttttccaaatttaatatttcctttctgtaagtctcagtgtctgcactatttgtcttggagacttaaaattatcccttgaaagcataagaagtacaccccaaaccagctttgtccttcctgtcctcttctagtttacattttatgtggttagtaattttgtacctaaaagtatttgaaattctataaatttggacttgacgtgagcaaaagaaaatttctacgtaagcgaaactaataaaactacagtcac

SEQ ID NO: 494 - DNA, 476 bp, Homo sapiens
ctgtggcatctataacctgagttcagtcacttaataccgaggtcctgcgctctgctgtgtgcctggccctgggctgggcactggggacatagcagtgaccgagacagacaggctcacaaggagacatacgacaaccaggtaaacatggcagacaagagcatgtcagatgcgctgtgaagaacactgcggggcccctcctaggaggtggcatgagttacatgcagacagagacgatccgggggcagacggagttccatgtggggcagtggtgagggcagacgctctggggctgggatccctgggagtgttcgagaagcaccgagaaggcttctgtggctggagccggccagctgggggagatggggccagggagatggcaggggcctctccctgtcccaggacccagagccaagggaggctttaagcccaggaccaggggtctgaaaacgaaaagcactcacagtccttgaacattg

SEQ ID NO: 495 - DNA, 542 bp, Homo sapiens
ggcaacctcctggacaaggacgacctggccatcccaccccccgattacggcgccgcctcccgggccttccccgcccagacggccagcggcttcaagcagaggccctacagtgtggccgtgcccgccttctcccagggcctggatgactatggagcgcggtccatgagcagtggcagcggcacgctggtgtccacagtgtgaggacgctgaccccgggcagccgctgctctgaagagcttccgcgccttccccctggtctcgtccgttttcctcctcagctctcgctggtttgttcttgggttgtttttcttttccacctgccccatgccttttggttggtgaccccagactctgtgatcccccagggtccatggtgctgctccatccgccccccctcccctgtgtttacgcgccccatcctgtgtgtcccagccttttgagcagaaactgccaggcaggacctgctgggccgtgcggggcaccctcggcctcaccctgcagtgtctgtggcactcactgcttttctaaggctcgccgtgagc

SEQ ID NO: 496 - DNA, 438 bp, Homo sapiens
gagaggtattatcgagacattgcaaagatggcatccatcagcgaccaggacatggatgcctacctggtggagcagtcccgcctccacgccagcgacttcagcgtcctgagtgcgctcaacgagctgtatttctatgtcaccaagtaccgccaggagattctcacggctctggaccgagatgcctcttgtcggaagcataagttgcggcagaaactggaacagatcatcagcctcgtgtccagcgacagctaaggtggtggaatcggtgaggagggggcttctcagtcctgtgccgtcctcccatccaggggagtggctggctcaagcctgggtccccgggctgagccctggattgggtatcgtggggcaggtcaccctggccacgatgcccccggcacacccaggcccccttcattagtgccttgctttgggccctgc

SEQ ID NO: 497 - DNA, 419 bp, Homo sapiens
  misc_feature (248)..(251): n is a, c, g, t or u
taagttctcatccaacatttctcctggccatccattctccatctttaaaggcaatcaccattgccagtttcttctgtatccttctggaaatacaatatattacataaatgacagcattctatattctctcttctatatcttacctatttctgtgaataatttattttggacagcattttatgtatgaatattcacaaatgtgcttccttatttcagaggctgaactaataaaaattttgtttattttnnnnttgaggcaatatttttatatggtaccctaatctttaatacttaacctgccagactttaaccgtaacacaataatgtattgccaaatagcaccattcttcttctctcactctcttgccatgggggctcttaaaaaaaaaagtatacatctaaggtgtacaacatgctgt

SEQ ID NO: 498 - DNA, 477 bp, Homo sapiens
accagtttacctaggccttggactgccaaatagctacacaactgcttaagctggcctataaggacagaccagagacaaagcaagaagatcattggtccagactgagaagaaagttgccagagggatgtctccactaaggcctttgagcagggattaatgctgtcaccaccttggtggagaacaagaaagctcagctggtggtgactgcacgtgacaatggatctcatagagctagctgtcttcctgcctgccctgcatcataaaatacaaagggaagagaagactgggatgtctagtccacaggaagacttgcaccactgtcgccttcacacagattaacttggcagacaaaggagctttggctaagctggtggaagccatcagaaccaatgacaatgacagacaggatgagatccactgtcactagggaggcaatatcctgggtccaaaatctctggctctcattgccaagctgga

SEQ ID NO: 499 - DNA, 366 bp, Homo sapiens
tgagggagggatgtgcctctggccacgtggttaccttgcagtgcacagcctgtggtcatagaaggggctacagctcacgcatcgtgggtggaaacatgtccttgctctcgcagtggccctggcaggccagccttcagttccagggctaccacctgtgcgggggctctgtcatcacgcccctgtggatcatcactgctgcacactgtgtttatgacttgtacctccccaagtcatggaccatccaggtgggtctagtttccctgttggacaatccagccccatcccacttggtggagaagattgtctaccacagcaagtacaagccaaagaggctgggcaatgacatcgcccttatgaagctggccg

SEQ ID NO: 500 - DNA, 537 bp, Homo sapiens
  misc_feature (193)..(193): n is a, c, g, t or u
  misc_feature (210)..(210): n is a, c, g, t or u
  misc_feature (379)..(379): n is a, c, g, t or u
  misc_feature (443)..(444): n is a, c, g, t or u
  misc_feature (446)..(446): n is a, c, g, t or u
  misc_feature (448)..(451): n is a, c, g, t or u
gaacaatcgtcttttgaacttccagtaggcccacagttgttggttgttcctcaaaacaggttgtggctcctgttgaataagatgatccattaaaaactgaacaaggttgaggagaaatagtgcttacgttgaaaaatctttaagtctttgtccccgttctctaacttccttacgttttcgtttatttagctcnatccccactatctactngaatttctcatatttaaaccaagatgggagactaggtcattaggaaaatattaccgtctacaattttcttatactttgatctgtcttttatttgattgtaagttgctgatggacagtgatcattagaaactgaattttgtataatactagttttatatgaaactagatntttattgcgctcaggttatgttccttttacctccttccttaataaagagaccacttgaaataannanannnnttccaagtactgtctgcaccttatcccacctctttcccatttatgagatagtgcaaaaccctagcacagtcttttccatttagtaa

SEQ ID NO: 501 - DNA, 332 bp, Homo sapiens
aagtatctccatacaaaatacggttgaattacaaaaagaaaattgtaacattagcatggacaaacctggcaggtactccttaactctcctaagtaataaaaactgtaaaatgcaaataagccttcgatgacatttactaacctttactaaagtatcaatgatgacttggttgtttaaacagctgacatttgggcaatttgagtatgtcaaactcaataatactggttttcatttgcaagatccacttaaaacttaaggaggccaaaaaacatcatttaaaataccctataaattataatcatacatatgatacgaaaaatatcctacttcag

SEQ ID NO: 502 - DNA, 375 bp, Homo sapiens
agggtaacttccagtgtcacaatgagcagttctgtaagtgggtgcctctcagcacatttctatgaatatattatgtagataggctgtattgattttggtagcattgacaccttcttaggcaattagttgaagaaaactgcaaaatattttcttatgtaatagctgtatagagcaatagcaatcaaagcatgagaaggcactaacgctgggatgaaagatgagattcagaggtgactgagaatcatgtgagtgatggctgtatattttgtgtaaaatatatgtgtgaaaatgaactaagagtgagttactcagcactctcaagaattatgcagattctgcatttttcttatgccgtgtgcctaaaaacctacttga

SEQ ID NO: 503 - DNA, 468 bp, Homo sapiens
  misc_feature (30)..(30): n is a, c, g, t or u
gggacaggatgaccttcccgaggaactcantggcctggggtagtttaagaagtaatgttctttctttctttctcttttccctacctcctgctaacccaaccagagatccccttccttgctgagagggttgggggcaggaggagatttggcagtgcctgcaggttgcctggccaggtggagagggggaaagaggaagggcaccgtgggtgtaagatgcctttctcctccacccatcgaaaccagccaccccttccctgtgccaccaagacagccttttccagtggccatcctaaggggaactcccaaatgggtgttgctggtggacacagatgctccccccaatggaagccccaagctctgaggtatgcgggtagaggctttggataggttttcttctgctcccctcttttatagatctaggctgcttggctgcctgtctttctaggcagtccccctagaggaaaaatg

SEQ ID NO: 504 - DNA, 484 bp, Homo sapiens
accccaccacgtaccagatggatgtgaaccccgagggcaaatacagctttggtgccacctgcgtgaagaagtgtccccgtaattatgtggtgacagatcacggctcgtgcgtccgagcctgtggggccgacagctatgagatggaggaagacggcgtccgcaagtgtaagaagtgcgaagggccttgccgcaaagtgtgtaacggaataggtattggtgaatttaaagactcactctccataaatgctacgaatattaaacacttcaaaaactgcacctccatcagtggcgatctccacatcctgccggtggcatttaggggtgactccttcacacatactcctcctctggatccacaggaactggatattctgaaaaccgtaaaggaaatcacaggtttgagctgaattatcacatgaatataaatgggaaatcagtgttttagagagagaacttttcgacatatttcctgttcccttggaat

SEQ ID NO: 505 - DNA, 277 bp, Homo sapiens
  misc_feature (136)..(136): n is a, c, g, t or u
ctgcacagtctccagtgtggaaagctgtgggaaaggaaggagcaggttctaggtcttcaggattttctgcatcttaaagcagctcatctcctttgccctcctagggagcaggggggcctagctttgggatcgtccncctagcctcagaaataattgttcaagaaataacatttctcacacaaaggataaatgtttgaggggatggataccccatcttccatgatttgattattacacattgcatgcctgtatcaaaaatctcatatatacacctact

SEQ ID NO: 506 - DNA, 515 bp, Homo sapiens
  misc_feature (380)..(380): n is a, c, g, t or u
gggggtgattagtatgttgggacaaacacgctgttgctaaatggaaacactgacctcacagtgcatcctcctgccaacacacacacacacacacctctcacacatgcacgcttacacacacacacacacacacacacacacacacacatacacacacacacacacacgctctctctctctctctctctctctctctgtcagtgtgttatcggtgtggagcggaggccgcggaggctcctcggtccttcagcacccctcggcccgacgcacccacgcccctcaccccccgagagccgaacgctccccgcaccgcccccggtcccttccctcggccgggagcgacttctgcagctcgttcttccgaatcgcaccagcaatgncggccagccgtagagggaggaagagcccggggagcccgagcatagcgtaaacggctctctgaccttaatttcatcctgcatggcgaatctctgccgtctctctgaacgcagaagggtctgagactggccgtctcc

SEQ ID NO: 507 - DNA, 259 bp, Homo sapiens
ttcagtttatactcaaagccctgcagtttcctgacagcacagagcacacctgtcacgcgagcaggatgaagcccagaggctgcctggtgaagtgggcggcgcgctggaaaatccacgtagctttgttccctccacggggagcgtgcaaggccctctcgagcactacgggagcctcgccttctgcacagacttcggagccaggtgctggagcggcagcaactgaggggcgtggatgtctttgcatggttcccatacgttt

SEQ ID NO: 508 - DNA, 285 bp, Homo sapiens
  misc_feature (189)..(189): n is a, c, g, t or u
atagcagtggactgtcactcatcagtatctgcagttctgtttaccaaagcctgcttgctagagacgtttcagggcctccttccctcaaagcgtccactgtacctccatctggatacaattagctggctccccacttcctggactgacggtaaccaccttttccaatgaccctgaagaaaacatgcaatntaagctgctttaagagtaacctacaactgaggacaaattttctatcaactcccagtacccctctctgccgtggctgatttgttactggttttcctt

SEQ ID NO: 509 - DNA, 274 bp, Homo sapiens
gaggtgcatgggatcaatgggacccaatggggccagactctgaggatgggatggtagtagtgaaggacataggatgggggtagagtgtggagactttttgaaatagtatagatgaatgccctgaggggactgtgaacaagctctgcccctcttaggaaatcaatggggaatcaactaaattaaataaaaaatggggtcaagattaagaggcagggtcacccagggaatggtttaggtcctggcaactctgaaggggttggaagggctggcagga

SEQ ID NO: 510 - DNA, 470 bp, Homo sapiens
gcgtgggtttttgtatccagagctgtttggatacagctgctttgagctacaggacaaaggctgacagactcactgggaagctcccaccccactcaggggaccccactcccctcacacacccccccccacaaggaaccctcaggccaccctccacgaggtgtgactaactatgcaataatccaccccaggtgcagccccagggcctgcggaggcggtggcagactagagtttagatgccccgagcccaggcagctatttcagcctcctgtttggtggggtggcacctgtttcccgggcaatttaacaatgtctgaaaagggactgtgagtaatggctgtcacttgtcgggggcccaagtggggtgctctggtctgaccgatgtgtctcccagaactattctgggggcccgacaggtgggcctgggaggaaaatgtttacatttttaaaggcacactggtatttatatttca

SEQ ID NO: 511 - DNA, 193 bp, Homo sapiens
gaaaatgaattccatgttcttgaaggaaagactgtaactatgtacattcatgatgttcctttggtgtgtggtttctgtgagtaacaggtagatgtcatttctggaaatggtatgtttatgtctatacattgttttataaaactccatggagaaagaaggggtttacttgctttgtatcacatagcaataacat

SEQ ID NO: 512 - DNA, 452 bp, Homo sapiens
ctggcccacccaggaacagtgagggcgacgagaactacatggagttcctcgaggtgctgaccgagggccttgagcgggtgctgttggtgcgcggtggtggccgtgaagtcatcaccatctactcctgagcccagtgtcatcttgtggcctggagtcgaggtcttggccaggacataacaagctgtggtctggggtaacagcctcttcccagcacccacctgccagccctgcttgcctggccctgtcctggacccagctttgctaggtctccttggaaaccaggcctgggcctcaaaatggagatggatcccaggtcttgtgggaccctgggatgtttggggactttactatctagcaccccagtaggcctgtcctggccagagaagactggtaggggccgagtggggtttgaaggcagccggcccggcccagcccaggagcgctatttattg

SEQ ID NO: 513 - DNA, 411 bp, Homo sapiens
ttggaggcctttgcagcggcctacaaaggcacgcggccgtttgccagtgccaacagcgtgctggaccccatcctcttctacttcacccagaagaagttccgccggcgaccacatgagctcctacagaaactcacagccaaatggcagaggcagggtcgctgagtcctccaggtcctgggcagccttcatatttgccattgtgtccggggcaccaggagccccaccaaccccaaaccatgcggagaattagagttcagctcagctgggcatggagttaagatccctcacaggacccagaagctcaccaaaaactatttcttcagccccttctctggcccagaccctgtgggcatggagatggacagacctgggcctggctcttgagaggtcccagtcagccatggagagctg

SEQ ID NO: 514 - DNA, 423 bp, Homo sapiens
  misc_feature (110)..(111): n is a, c, g, t or u
tcgtttctctgaacacacaacacccatcgtcctcttttatgttacttgaaatatcaaaagaattattacagctgaaaacaaatctatgtaaatcggatcttgaaagagannaagctttctccagttttgaaaggcgccatttttaactttgatcttgtaatgacaaataagaatgttgaatcggctggcttttttctatcctaggtaatgtggactgtggagctctgtgctggtcactttcaaccctgaacctgatgctacttattttgcagttctaagtgcaaagtcggcctggtggatgcttcccattataatattaaatttgcttcttcgtgaggtcacacctcacatccccagtgtcactttaataactagtgttttttacatggtgggccatgacccattagtggactctgcatttaa

SEQ ID NO: 515 - DNA, 230 bp, Homo sapiens
ccctggcaaggcccgggacaggaaggcctacacggtcctcctatacggaaacggtccaggctatgtgctcaaggacggcgcccggccggatgttaccgagagcgagagcgggagccccgagtatcggcagcagtcagcagtgcccctggacgaagagacccacgcaggcgaggacgtggcggtgttcgcgcgcggcccgcaggcgcacctggttcacggcgtgcaggagc

SEQ ID NO: 516 - DNA, 426 bp, Homo sapiens
atgaccttcgaatgcataggcctttaatggtgcagacagaggaccagtatgttttcctcaatcagtgtgttttggatattgtcagatcccagaaagactcaaaagtagatcttatctaccagaacacaactgcaatgacaatctatgaaaaccttgcgcccgtgaccacatttggaaagaccaatggttacatcgcctaattccaaaggaataacctttctggagtgaaccagaccgtcgcacccacagcgaaggcacatgcccgatgtcgacatgttttatatgctaatatcttaattctttgttctgttttgtgagaactaattttgagggcatgaagctgcatatcatagatgacaaattggggctgtcgggggctgtggatgggtggggagcaaatcatctgcattcctgatgaccaatggg

SEQ ID NO: 517 - DNA, 448 bp, Homo sapiens
gagcaagttgtaaattgtctcttatcggacttaaaagggtgcctggctcttacttagttgattatctcctggatctggaaagaaaggaaggaaaacaaaggcggaaggggaatctctatagaatgtggatttttcccacaagagactttgcagggcaatttcaaggtatggcacggaaatatattttggggttaaatatttttttccttgtctcataatgttatgccagagtcagattgaaaagtaaatcacaacatatagggtcaaataaaacccatctgatgagaatgtgtggtttgtagggcatgacttcctagacctcttaggtaggaatctgggtaagacagaatatcagacttagtcctcaattcctaatgcaaagttctgagatccaaaatgctccaaaatctaaaacattttttagcaccgacataatgccacaagtgga

SEQ ID NO: 518 - DNA, 148 bp, Homo sapiens
aattaacaccaggaacagcaccttgaatattcctttttcaagttcctcttcctcaggagatattcaaggtcgaaacacaagccccaatgtttctgtacagaaatccaatcccatgaggattactgagagtcatgccaccaagggccac

SEQ ID NO: 519 - DNA, 173 bp, Homo sapiens
  misc_feature (141)..(141): n is a, c, g, t or u
gaaaatcacaactctaaccataatcatctgcactatatgcctcgcatcaggtaatgtgtctaaaataataagtaacatttagcatttctgaccttatcccaaagtattttaatagtatctgttaatgttttaattaatggnttttgtattgcatctcctggataacaaagtag

SEQ ID NO: 520 - DNA, 441 bp, Homo sapiens
  misc_feature (26)..(26): n is a, c, g, t or u
  misc_feature (28)..(28): n is a, c, g, t or u
  misc_feature (54)..(54): n is a, c, g, t or u
catgagtgtgagctgatttgcacccnancaccctctgtaagtgcctgctgtggntttggttttgattattccgttaatgctgagtctgtttcacaaacgagattagcagaattaattattgaagatgcagtatgctttatggttttaataacactgttaaaaactaaacaaggaagttaaatatgttgatgattatcggtgactgctcaccacacagcatccctcaggccgagtcagttggcccagtgactcccacatcacaaactgccctttcttggtcagaagaagcagagtggagccttctcatccccacgcgcgcagctgtggggccccgtggtcacctggccacatgggagtttgcatactgagtggttcatcttttccaatgtgttgtgtcctttaatttacatttatatttcattgccctttctaatgatcaga

SEQ ID NO: 521 - DNA, 488 bp, Homo sapiens
  misc_feature (456)..(456): n is a, c, g, t or u
tttgagttctgctctggccaatccccaagctccacgctgtcagccaccccgctctcctacctcccagaggagcaggctacactcctgttccttttagagagagaaatattgcggccgggcgcggtggctcacgtctgtaatcccagcattttggcaggccaagggttttgccatgttcgtggggctggtctcaaactaattacctcagatgatccgcccacctcggcctcccaaagtgctgggattacagccgtcctgggccgccggacacccccgctggggccgatgcccaacagtgacatcgacttgagcaacctggagcggctggagaagtaccggagcttcgaccgctaccggcgccgggcagagcaggaggcgcaggccccgcactggtggcggacctaccgagagtatttcggggagaagacagagttccagcttctaaaatatttgctnctaaaatcttgaccacctgactttccggattg

SEQ ID NO: 522 - DNA, 339 bp, Homo sapiens
  misc_feature (117)..(119): n is a, c, g, t or u
  misc_feature (228)..(228): n is a, c, g, t or u
aaaatggatcctgtctttcttagccaaggactggtctcttttctccaatgtgtccctaacagagtggtgaggctggctcttcccaccagtacaggaagatcattccttaaaagaaannnccatatggcttataagtgttctttcctgtatgaagcccaagctgtccacttggagagacatctggccagccccccgttgttccagccatccccagttcaggcatcaganatgtggtgaagaagccatcctagatgcccagccccagctaccatctgatgcaaccacactgctcaccccgagcaagaactgcctgcaggagcctagtattatcctctctca

SEQ ID NO: 523 - DNA, 396 bp, Homo sapiens
gcggcagcaaccggaaccggaactcgtcgcggccaccaccactgagcgctgcggggagggggagcaaggaccggacgagacgctacgcctgaaaacaggcggcgggcgagggacgaggcttaccacggcaccacgcgagtggaaagggtcgtctccgctagcggcggcccacaccagctcaccgaggggcggcagcgcgcggcccggctgccggaccgtaccatcccgggcggtggagccgccgcggaggggcgcgcgcgagccgaaggcgcacccgggaggcccaggtagcccgggggccggtgctggggcgccgggcaggcccggctcccgcctcgacccacccggagccagccccctctgcggacacgacatccccatggggacggtggcgcg

SEQ ID NO: 524 - DNA, 194 bp, Homo sapiens
ccccacaggtgttcctctgtgagctggtcgggcggccggggccggggccgggcttcgctgctccgtgccttccacctccctggcggtgcggggcctcagggtgggcctgggaagctggaaacacctttggaaacagccgcctgaggcagctgtggacagaagaccctgcccagcagccaagggagctggcctct

SEQ ID NO: 525 - DNA, 526 bp, Homo sapiens
  misc_feature (424)..(430): n is a, c, g, t or u
  misc_feature (443)..(443): n is a, c, g, t or u
  misc_feature (445)..(445): n is a, c, g, t or u
caagggcacgaggcagtacctttgctccatgcctttgcttggactagtcctaccaccagcaattcctgcatttctgtgtttggcaagtttctgctcagcctccaaagccttaaccaagtgtcaccttttctctgcagcattttctgccaccctccccatttcttccaatagaaccagggatcttttacttgggatccagaagcactgtggacatattgccatcacaacacctttcatgtcacaatggcaaggtttgcactgtcttggaggagaggaaggaagccatattcatccctgaaccctcatctcccagcactggttgtaaaactgaaacaaaaatggaaaaccttgatgaaattcattgttggtgtggctatggggaaacagattttccatttctgatagtaaatgaaataggcaccannnnnnnaaaaaaaaaaaananattattaacactgaaaatgcacacatctttcaacccagcaattttatttcttgctttctagaggaatgtttgcccatgtgc

SEQ ID NO: 526 - DNA, 197 bp, Homo sapiens
cattattaattataccaatcctttcatatatgtagaaaaaatgtttgagttggtcatctgtcttttattgaagatgcatttcaaatatcaaatatatttgaaagataaaatagcatctgtgaaattgaatattattttatgtgcgcttggctatgccctaaaatgtcagtttattgtccctaaagacgtatttattg

SEQ ID NO: 527 - DNA, 275 bp, Homo sapiens
ggatgaacgggtgggctgaagaacagctgaatccaatagcttggcagaacatgaagacaggtttgttttccagattcttaaaactccaaacttgatattattacagacacaaagtaaatggcacataacaagaggaaggagatcacagtttgcaaaacttttatgtggaccttggtactgggatcttgagatcctttgccatggaggtgcatcttcttgagatgtttacacagagaacagactaacagcagaaaagatatcagggttacagtaaa

SEQ ID NO: 528 - DNA, 496 bp, Homo sapiens
  misc_feature (43)..(43): n is a, c, g, t or u
  misc_feature (46)..(46): n is a, c, g, t or u
  misc_feature (48)..(48): n is a, c, g, t or u
  misc_feature (51)..(51): n is a, c, g, t or u
aataaatcctgcgagttcacgcccgcgtagttcgccccctganttntngangcgactcctttcgcatgggatctacaaaaccgaactgccttaaagacctctttcacacggacgtgaagtcacagaactgacaaaatcccatcctgtcaaagtgcacgggtctttgaaatctaacacaaaaagccatagaaagattctctaaacaccctgtactaagaggaacacggacagggcactgcgttctgaagtagaggccagggcactggcccttagacacgtctcgctgtcaccgggctaacaacattggcaagggcggcggcagcagcactgatatttgcagcccccaagggctctggcgaaaccccctctattactctgtatcctgcctgcttccaagatgaacctgttgctgggaaagaacaggctaaattagaaaagggagtattttgtcaaagttgaaggtgagtgatagcctgcccgcctcaaataggatggg

SEQ ID NO: 529 - DNA, 524 bp, Homo sapiens
agcgcagtggcgaggcgagtgtggaaggactcctgaaccagctcgtcctggagcacctgcagctggcgcctctgcagtgggatgtgctggtggacggacagccatgtgaccgcgaggctgtggcggcctgccaggtgggcgaccccgtgcgcctggaggtgcggctgaccaaccggagcccgcgcagcgtagggcccttcgccctcactgtggtccccttccaggaccaccagaacggcgtgcacaactacgacctgcacgacaccgtctccttcgtgggctccagcaccttctacctcgacgcggtgcagccgtccggccagtcggcctgcctcggggccctcctcttcctctacacgggagacttcttcctccacatccggttccacgaggacagcaccagcaaggagctgccaccctcttggttctgcctgcccagtgtgcacgtgtgtgccctggaggcgcaggcctgagcccgcctacttccgtccctctttctgcagggccagaggtgaccctgcctg

SEQ ID NO: 530 - DNA, 497 bp, Homo sapiens
aggtcaatctcgtattctctatgtgatattgctgacaaagtcaaagtaaggaaagacatatcaagggaaggcaatggaagcaccttttctttatagtacattcacctaccttaacagaccaagataacataggagagaaactggggcttaagtccttgatagagcttctgggggcacagtagttatagggccaggtcagaaaatgtcctcacacactaagaaggcattttaaaatcagaaaagacagtcacactcactttggtcaccaagtcatttagccatcctgtctggaaagcatgttttcctctggggtcttcctctggggtatcttgggaaagggtagagttttgaggagctagagaagagaaagaggtcatgagggagattagtcctttctgaatagcctaggaaacccctcaccaaatagatgcctacactttcttaaatcgagaagtaagaaggaaatcaaaaacagcactcctacttcaaagcatcag

SEQ ID NO: 531 - DNA, 253 bp, Homo sapiens
gtgaaaagcaaccaaaggcaacagagtctagctcatggccaccagaccaaaagcatccagcttctgtgcacctcctgcaaagctggcagaggccctggaattccagatcacctgaggggaaagggttgtctctctcctttctgttgggggagggggatgggggacttttgttggtggctcccacccatatatccctcctttaccatagtactcccacccacttccatcacccatccaataaaatgcagccagg

SEQ ID NO: 532 - DNA, 567 bp, Homo sapiens
cacctcggtcaccagtgtgaaccaagccagcacatcccgcctggagggcctacagtcagaaaaccatcgcctgcgaatgaagatcacagagctggataaagacttggaagaggtcaccatgcagctgcaggacacaccagaaaagaccacctacattaaacagaaccactaccaagagctcaatgacatcctcaacctgggaaacttcactgagagcacagatggaggaaaggccattttaaaaaatcacctcgatcaaaatccccagctacagtggaacacaacagagccctctcgaacatgcaaagatcctatagaagatataaactctccagaacacatccagcgtcggctgtccctccagctccccatcctccaccacgcctacctcccatccatcggaggcgtggacgccagctgtgtcagcccctgcgtcagccccaccgccagcccccgccacagacatgtgccaccctccttccgagtcatggtctcgggcctgtaagggtggggggcctgggcccggggcctcccccgtgacagaaccacactgggcagaggggtctg

SEQ ID NO: 533 - DNA, 402 bp, Homo sapiens
cagtattctgtaccatagcgctgctcttatgccatttgtttatttttatatagcttgaaacatagagggagagagggagagagcctataccccttacttagcatgcacaaagtgtattcacgtgcagcagcaacacaatgttattcgttttgtctacgtttagtttccgtttccaggtgtttatagtggtgttttaaagagaatgtagacctgtgagaaaacgttttgtttgaaaaagcagacagaagtcactcaattgtttttgttgtggtctgagccaaagagaatgccattctcttgggtgggtaagactaaatctgtaagctctttgaaacaactttctcttgtaaacgtttcagtaataaaacatctttccagtccttggtcagtttggttgtgtaa

SEQ ID NO: 534 - DNA, 279 bp, Homo sapiens
  misc_feature (178)..(178): n is a, c, g, t or u
tgcattgtacctgtagccattccattgtgaataacacaaaaagtggaggaaatatttttctcgcatttggaaattattctgtgattcagcaaagaagttgttcatgtcattaacaagttcagaaatacatgctgccaaagccaaaaagagtcttcagtttaataaaaataattaacangaaggtgagaaatggtttaccagctgttcacttactggatttaaggttacttgttggggaaagagcagagtaagatgcaactctgtcaaatcatggctgaa

SEQ ID NO: 535 - DNA, 354 bp, Homo sapiens
tagcaaaggacatggaagcctggaaagatgtaaccagtggaaatgctaaaatttaccagcttccagggggtcacttttatcttctggatcctgcgaacgagaaattaatcaagaactacataatcaagtgtctagaagtatcatcgatatccaatttttagatattttccctttcacttttaaaataatcaaagtaatatcatactcttctcagttattcagatatagctcagttttattcagattggaaattacacattttctactgtcagggagattcgttacataaatatatttacgtatctggggacaaaggtcaagccagtaaagaatacttctggcagcactttggga

SEQ ID NO: 536 - DNA, 497 bp, Homo sapiens
  misc_feature (302)..(302): n is a, c, g, t or u
  misc_feature (304)..(306): n is a, c, g, t or u
  misc_feature (308)..(309): n is a, c, g, t or u
  misc_feature (311)..(313): n is a, c, g, t or u
  misc_feature (315)..(317): n is a, c, g, t or u
  misc_feature (354)..(354): n is a, c, g, t or u
  misc_feature (361)..(361): n is a, c, g, t or u
ttccctgatgactcacttacaagttagtgaactccttgtttaagtattacaaactgcacaccttctcccttctcaatctagcttcacatcaggccttcctgccaaagcggcaaacttgccacatggggcaaggtactccccaagcagacaaggcccatctgtgtcatgagtgatacccaatgctaatgccatgctctgaaatgtagtgcccaccttggcttcccaaagtgctgggattgcagacgtgagtcactgcgcccagccattccatgtctcttaagtctcagaatctcccctagctncnnncnngnnncnnnagtggttgtcccctcaaagctgtcccacaccctcctncgaggancctttgtgtatctcctccagctaccgcagagcccacaaacccaggcatctatcaaagtccctcattcatgagggtggtgaggacacagactgcgaccagaacagaaatatgaaaatgtgaatgacagcgtcccccg

SEQ ID NO: 537 - DNA, 340 bp, Homo sapiens
  misc_feature (68)..(68): n is a, c, g, t or u
  misc_feature (81)..(81): n is a, c, g, t or u
  misc_feature (115)..(115): n is a, c, g, t or u
  misc_feature (118)..(118): n is a, c, g, t or u
  misc_feature (120)..(120): n is a, c, g, t or u
  misc_feature (122)..(122): n is a, c, g, t or u
tggagttagcaaaccttttcatgcctgtgacctcactggagttctttgatgttgggacttcataagtntgccaaatcctgncacttactgctttatgaccttgaccatttaccgnttntntntggacctcagtgttctcaggatgcaaaaggagggtcaggggtaaaatagcgactttcgaactgtcaggggtaaaatagcgactttcaaacttttcaaacttctgggacaagggtgaagggcaggactctgcctctctccttcccttcaccttattccacttaaattgtgtgattctacaagcttatgtttaaaggaatatgttcctccattacaaaga

SEQ ID NO: 538 - DNA, 527 bp, Homo sapiens
  misc_feature (133)..(133): n is a, c, g, t or u
  misc_feature (148)..(148): n is a, c, g, t or u
tgggaccacgggcatttttggcatgtacaagggtataggtgcctcctacttccgcctcggcccccacaccatcctctccctcttcttctgggaccagctgcgctccctctactacacagacactaaataacanccgctttcccagtcntccaccaaatgagcactccttggccacttgtgcctccaccactatgtcctggtgactactgattaggtgacctttcatccatccatgggggacagccaaccccactccccatctgttctcagggttgaatcactacaagagatgagtttcccttctttccttgggtgttgctttaaaccttccctacccattccctgggtaactcacacccctctctcagggctgaacgagtcatcccaaagtgtatttcctcccactcaccactgccacccttgagtccctcctgctcccatgcacagttttaaactcctccctccaaaaccaaagggaattgagagacccaattcccaggcgtctgggacccaggtgtcctgttaga

SEQ ID NO: 539 - DNA, 532 bp, Homo sapiens
gacatgttttctagccttagttccccatctacaaaatgggcctcatggaatggaatgtctccacttcactccagcatcaacaagtggggaattctgatggattcaattcgacttctttccatgggcgtgttctaagcagcctctttgttccagaagctgccctcagccagagttggataagccaatcctcactccccagcctcctctggatagggatgaagaccccactggggttggaagtgcagaggcagacaggtgtatggagtcacctgtaaattgattcaagtgagccaggaaagcagcaaaggaaagagaaacctgagtgacgacgtggtggaggaacagggctggaaagaggctgctggctgtctggcttcgcagctctggcctcctaatcagcctcgctcttgtctctggtgttctctggctcttgtccatctgtctgtgtttctttttgccagctattgactaatctttgctgaagctgagctagaattctggtgtttataagcaggtaactagctgagcacta

SEQ ID NO: 540 - DNA, 811 bp, Homo sapiens
ctttgggaggctgaggcaggcagatcacctaaggccaggaattcgacaccagcctggccaacgtggcaaaacccgtctctactaaaaatacaaaaattagccgggcgtggtggtgtgcgcctggaatcccagctacccaggaggctgaggcaggagaaatgctggaacccgggaggcagaggctgcagtgagctgagatcatgccactactgcactccagcctgggtgacacagcaagactccctctaaaaaaagaaaaaaagaaaagaaaagaaaagaaaatgatatatccatgatgaattaaaatggagtggaacccactgatgggaaagccacagaaggtaccagttatccactcactgacttaggtgcctccactagaattctcagcacgtttttgcagaacctgggcaacaagagcgaaaccccatctcaaaaccacaacaacaacaacaggacaacagagatggacgacggatcgggaaagccaaccagacagcgtgaggccaggacggaaagaggcacagggagctctgctcagtgtcgctacaggggatctctcaggctcacaacgggccactcctctagggaagttctggtctcatcatgatccttgtttggtctcactccccatgtccttctctgtccctcctccaactgccatttatttatttaactgaaaaagtaccaatcacccacataggcatgacatactcatccatgtacccatttcttaaaattgatcattgttaacatttggtgtaatttgctttatttatttttaatgaaataaataaaactttacagaaaa

SEQ ID NO: 541 - DNA, 3874 bp, Homo sapiens
aaaaaggtacaactaccttgctgatgctgtacatatggctcacttgtgcccagagagagaataaagccatgtcgaaactatctacgattccttgagtgtttttccagctacctgccacttgcccacccactcccctcagatctcagttagaacatgacaattgggctcatgaacaggatcctgagtggttgcaggtgaacaagcagttggcacaagggcaaagtgatcacatcctgattgagtggctatggacagccatacagactgtgtggaacaacgctggtgaaatacccaaaccatttagaagcagtaatgcctcacttgcctgggactgggatggtgtggctgagactgccttactggcagccaggtgcgctattcagcagccacaagccctacaagtaattaaccaggggcacctgtttgagctggaggtgcatgtggccacagacggttttggttgaggcttgtggcaatgcacagagcgcctaagaatgccagtaggcttttggtcccaactatggaaaggagctgaactccggtattcattgatagagaaacagctagcagctgtatatgctggccttcgggctcatgagagcatgacaggacaggctgcagtcatcatatggacaacttacccaataacaggatggatgcgtctatgtgtaatgaccacctggagtgggatagcacagatgtccactttggcaaaatggggcgactccttgcagcagtggagtaagctgagtacaagtcccatagcagcagagttgcaagaggtcttgggacgtgtagtcctaatgcaagataaggccatgcggcctgaggcacccctagatcctgagtcttcaccatttaaggaagggcatcccaggattcctgagggggcatggtacacagtagatgaggtgctactgctgcctggaccactgttgcagtccaacctagtactgacaccatatggtttgaaactgggtgcggacaaagtagccaatgggctgaactcagagcagtgtggatggtaatcaccaaggaggtgacacctgtggtaatctgtactgatagctgggcagtctactgaggcttaaccttgtggttaactacttggaaaatacagaattggctagtgagccacagacccatttgaggccaagccatatggcaagacctttggggaataggtcatcaaaaagaggtaactatttatcatgtgtcaggccatatgcctttggccacccctagtaatgatgaggcagatgccttggctaaggtcagatggtcagagtcagcaccaacacaagatgtgaccttgtggctacaccggaaactgggacatgcagggggtaaactgatgtaacaattcaataagtgttggggtctgtcccttcccaagcaagacatttgtgaggcttgtcagaaatgcctggcatgtgttcagacatatcctaaaaagaggcagctgcccggtgttatacaacaagtaacaatagggtgagtgcccttgaccaggtgggaagtagactacatcgggccgccgccaaagtcgcgagggtatacgcatgcactaacggctgtagacatggccacaggcctgttgttcacctacccttgcagggtggccaaccaacagaacaccatccaggccctgcaacacttatgttccctgtatggttgtcctctggccattgagagtgataggggaacacatttcactggacaacaggtacaatgatgggcacagcaaatggacataaagtggggattccatgtgccatacagcccacaagctgaggtattattgaatgatataatgggatcttgaagaatggattacgcttgcatgtcaaacccctgtctttgcggagctggagttccaggctggacctggtgctccaaaccttaaatgaatggccacagaaaggtggcccggccccagtggaggctttgtttcactaggccaccacccccattcaattggagatacataccaaggatgacctcctccgatcaggtatggggacaaatggtaacctgttgttgcctgccccaacaaccctgaaggcaggggaacagaaaacctggctgtggccatggaccctccaagctctccactgctggtggttggccatcatagctccctgtggggagggcctacagtatgacttgcatgtcactttttgagtgttcaatacatggcttccaaggttgactgtttgtagaggaacagccagggaaggaaccctcctctgagggacatatgtactatctgatgggcctattatgagctacgctgtgactttggcatggatacaggattctaaggaaccatggagatttgagaaggtgtggtaccatcacccagggcaaaagcccttggtggctgcattgttatccagggatggaaagttagcctatattttgcctgagggatgtgatttacctctgttagtacctgtgcctgctctgtcatttcaaccgtaggttaacatgctccaattgcattgtggactgaccccacacctatgctgaggtgaccaatgtttccaactgttggacctgcactgcctttccagcagcagctgcagacagcttgccccgacacatacatcccgtgtctgcagagaactggacatgcctggagacttgagatcccatggctgatgcctggaacacaatgtggcaagctttggacaaaggacacagcaagacccatggctggaccgtagcattcgtgatgagtggggctggctagtaggggaacatgtagtagcccaagcccaggcattgcagtgcacagagcaacattggggtaacaggatgggtacctgtcacggcctgtgcaaacataacatgtgtcaccacactgaaggtatggtagaacaagtggcctcaccaaggtcggaccccaatggactttttgcctcttgggagcttatgggtctatgaggacacagtagcctttcctatcagcaaactggagtggatgttgtatctgggggtggccttatgtacctgctactgttctccccacattgcccagatgcctgtataactgggaggcactgtgctctcagtttttgcgaatgtgatgagccccctggtgtttctaccctttggcaatgactatccctggagcaggtgtcaaaactgtagaagcacaatttactgctcttgcggagcacaccgctcaggctctgaattacacctgagtgtccctcctcctgttaatgaatgaggttgatcagatcaaaaagtggtgttgcaaaaccaagtggccttagacataactgctgcccaaggagccacctgtgcccttttaggaacacaatgttgtaccttatccctgacaatcagcagaacataacagcagccctgcaaaggggtcttccaggagattaaggtgactgagagcctcactgtcaaccccctgcagagatggtgagcatccctaggttctggcgtacattgggccctaatagtcataagtatcatagctgagatcctagtagtgagctgttgctctctgtattgttgttgtgggttatggactcagggctccgccatataggcatgtgtccctgcctggaggacgccctcagcctagggggtgtagtgtaagggaaatggctgtgctttagtcaggagtaggctgaggcagccttctggtgcagcatgactcagtgggtttggagtgcaagcacacaaccttgctcgttatgtaaccacaccacatgaggcccattaggtaacaactcacatgagctcgtgtttggctcagagccactattgtctgtaaaaggtataccttgctgatgctgcacatatggctcgcttgtgcccagagagagagtaaagccatgttgaaactgtc

SEQ ID NO: 542 - protein, 177 aa, Homo sapiens [sequence omitted]

SEQ ID NO: 543 - DNA, 21 bp, artificial
  Description of artificial sequence: Oligonucleotide
catgaacaggatcctgagtgg

SEQ ID NO: 544 - DNA, 24 bp, artificial
  Description of artificial sequence: Oligonucleotide
tgaggcattactgcttctaaatgg

SEQ ID NO: 545 - DNA, 2863 bp, Homo sapiens
cacgccaaacacgcagccccctcccgctggagtgacaactggccagcatactctaggctgttgtccctttaaaacttgaatccaagggggtaatgatttatcaaacttgtattatcaagaaaatgtcaaaccaagggcaccttgctttgcactgacgcaaacccggcctttcccaaggagatatagaaagcgcctctcctgcctgagccaaacccagtcttgtcaatagcgggtttcaccctccaccagttcagtctgttgcctgtgtcagacatggattgcagtgctcccaaggaaatgaataaactgccagccaacagcccggaggcggcggcggcgcagggccacccggatggcccatgcgctcccaggacgagcccggagcaggagcttcccgcggctgccgccccgccgccgccacgtgtgcccaggtccgcttccaccggcgcccaaactttccagtcagcggacgcgcgagcctgcgaggctgagcggccaggagtggggtcttgcaaactcagtagcccgcgggcgcaggcggcctctgcagctctgcgggacttgagagaggcgcaaggcgcgcaggcctcgccccctcccgggagctccgggcccggcaacgcgctgcactgtaagatcccttttctgcgaggcccggagggggatgcgaacgtgagtgtgggcaagggcaccctggagcggaacaatacccctgttgtgggctgggtgaacatgagccagagcaccgtggtgctggccacggatggaatcacgtccgtgctcccgggcagcgtggccaccgttgccacccaggaggacgagcaaggggatgagaataaggcccgagggaactggtccagcaaactggacttcatcctgtccatggtggggtacgcagtggggctgggcaatgtctggaggtttccctacctggccttccagaacgggggaggtgctttcctcatcccttacctgatgatgctggctctggctggattacccatcttcttcttggaggtgtcgctgggccagtttgccagccagggaccagtgtctgtgtggaaggccatcccagctctacaaggctgtggcatcgcgatgctgatcatctctgtcctaatagccatatactacaatgtgattatttgctatacacttttctacctgtttgcctcctttgtgtctgtactaccctggggctcctgcaacaacccttggaatacgccagaatgcaaagataaaaccaaacttttattagattcctgtgttatcagtgaccatcccaaaatacagatcaagaactcgactttctgcatgaccgcttatcccaacgtgacaatggttaatttcaccagccaggccaataagacatttgtcagtggaagtgaagagtacttcaagtactttgtgctgaagatttctgcagggattgaatatcctggcgagatcaggtggccactagctctctgcctcttcctggcttgggtcattgtgtatgcatcattggctaaaggaatcaagacttcaggaaaagtggtgtacttcacggccacgttcccgtatgtcgtactcgtgatcctcctcatccgaggagtcaccctgcctggagctggagctgggatctggtacttcatcacacccaagtgggagaaactcacggatgccacggtgtggaaagatgctgccactcagattttcttctctttatctgctgcatggggaggcctgatcactctctcttcttacaacaaattccacaacaactgctacagggacactctaattgtcacctgcaccaacagtgccacaagcatctttgccggcttcgtcatcttctccgttatcggcttcatggccaatgaacgcaaagtcaacattgagaatgtggcagaccaagggccaggcattgcatttgtggtttacccggaagccttaaccaggctgcctctctctccgttctgggccatcatctttttcctgatgctcctcactcttggacttgacactatgtttgccaccatcgagaccatagtgacctccatctcagacgagtttcccaagtacctacgcacacacaagccagtgtttactctgggctgctgcatttgtttcttcatcatgggttttccaatgatcactcagggtggaatttacatgtttcagcttgtggacacctatgctgcctcctatgcccttgtcatcattgccatttttgagctcgtggggatctcttatgtgtatggcttgcaaagattctgtgaagatatagagatgatgattggattccagcctaacatcttctggaaagtctgctgggcatttgtaaccccaaccattttaacctttatcctttgcttcagcttttaccagtgggagcccatgacctatggctcttaccgctatcctaactggtccatggtgctcggatggctaatgctcgcctgttccgtcatctggatcccaattatgtttgtgataaaaatgcatctggcccctggaagatttattgagaggctgaagttggtgtgctcgccacagccggactggggcccattcttagctcaacaccgcggggagcgttacaagaacatgatcgaccccttgggaacctcttccttgggactcaaactgccagtgaaggatttggaactgggcactcagtgctagtccagtggtgtgggatggtccagacttgatcctgtttttcctctctgcctcctcctaatgttttccatagctctcctcccatttttcttcatctttcttcctacatcttggttcacatccacgcatgagagtgattatgtagaaaagtaggcatagtgtcgcatgctgcagtaaagagctacatagaccacctgaa

SEQ ID NO: 546 - protein, 797 aa, Homo sapiens
MDCSAPKEMNKLPANSPEAAAAQGHPDGPCAPRTSPEQELPAAAAPPPPRVPRSASTGAQTFQSADARACEAERPGVGSCKLSSPRAQAASAALRDLREAQGAQASPPPGSSGPGNALHCKIPFLRGPEGDANVSVGKGTLERNNTPVVGWVNMSQSTVVLATDGITSVLPGSVATVATQEDEQGDENKARGNWSSKLDFILSMVGYAVGLGNVWRFPYLAFQNGGGAFLIPYLMMLALAGLPIFFLEVSLGQFASQGPVSVWKAIPALQGCGIAMLIISVLIAIYYNVIICYTLFYLFASFVSVLPWGSCNNPWNTPECKDKTKLLLDSCVISDHPKIQIKNSTFCMTAYPNVTMVNFTSQANKTFVSGSEEYFKYFVLKISAGIEYPGEIRWPLALCLFLAWVIVYASLAKGIKTSGKVVYFTATFPYVVLVILLIRGVTLPGAGAGIWYFITPKWEKLTDATVWKDAATQIFFSLSAAWGGLITLSSYNKFHNNCYRDTLIVTCTNSATSIFAGFVIFSVIGFMANERKVNIENVADQGPGIAFVVYPEALTRLPLSPFWAIIFFLMLLTLGLDTMFATIETIVTSISDEFPKYLRTHKPVFTLGCCICFFIMGFPMITQGGIYMFQLVDTYAASYALVIIAIFELVGISYVYGLQRFCEDIEMMIGFQPNIFWKVCWAFVTPTILTFILCFSFYQWEPMTYGSYRYPNWSMVLGWLMLACSVIWIPIMFVIKMHLAPGRFIERLKLVCSPQPDWGPFLAQHRGERYKNMIDPLGTSSLGLKLPVKDLELGTQC

SEQ ID NO: 547 - DNA, 24 bp, artificial
  Description of artificial sequence: Oligonucleotide
ggatttgcaagttgtgtagtgtgc

SEQ ID NO: 548 - DNA, 21 bp, artificial
  Description of artificial sequence: Oligonucleotide
aagcagatggtcatcttccag

SEQ ID NO: 549 - DNA, 2426 bp, Homo sapiens
ctctttcaactcaagagctcagtcctgtgtctctcatggaggcgtctctaaccaggaggctactctttaaagacaggcattttacttgcagcaaaataataggaaggagattcgcttgctttgcacagaggctgagccacaggagaaagcaaagccaatgtgatttattgaatgaaagcactggacaattaccaacaacttgttcctctgctgcctcgaacagcataaactggaattgtcgtgtgaaaatgacgcaacaaatgcaaaatttacatctctgtcagtcaaaaaaacatagtgctccctcatctcccaacgcagccaaacgcctgtacaggaacctctctgagaaactgaaagggagccactcttccttcgatgaggcctattttaggacaagaactgatcggctgagtctcaggaagacctcggtgaatttccagggcaatgaagccatgtttgaggcagtcgaacagcaggacatggatgctgtgcagatcctcctgtatcagtacacaccagaagaacttgacctcaacacacctaacagcgagggcttgacacccctggatattgccatcatgaccaacaatgtgcccattgcaaggattcttctgaggacaggggcccgagaaagtccacactttgtcagcctggaaagccgagcaatgcacctcaacacactggtccaggaagcccaggagagggtgagtgaactgtctgcccaggtggagaatgaaggattcactctggacaacacagagaaagagaagcagctgaaagcttgggagtggaggtatcggctctacagacgcatgaaaacaggctttgagcatgccagagcccctgagatgccaaccaatgtctgtctcatggtaaccagcagcacatcactcactgtcagcttccaagagcctcttagcgtcaatgcagctgtagtaaccaggtataaagtggaatggagtatgtccgaagacttttctcctttggctggagaaatcatcatggataatctgcagactctgagatgcacaatcacaggacttacaatgggccaacagtattttgttcaagtctcggcttacaatatgaaaggatggggacctgctcagaccacgacaccggcatgtgcctctccttctaactggaaagactatgacgacagagagcccagacacaagggacagagtgaagttttggaaggtctgctgcagcaggtccgagcccttcatcagcattacagttgccgggaaagcacaaaattacaaaccacaggccgcaagcagtcagtctcaagaagcctgaaacacctgttccattcctcgaacaagtttgtgaagaccttaaaacggggactctacatagccgttatattttattacaaagacaatatcttagtcaccaatgaagatcaagtaccaattgttgaaatagatgactctcacaccagttctattacacaagattttctgtggttcacgaagctgtcttgtatgtgggaagatataaggtggctgaggcaaagcataccaatatcctcatcctcatccacagtgctgcaaactcggcagaagatgctcgcagcaacagcacagctacagaatttacttgggacacacaacttgggaagagtttactatgagcccattaaagatcgacatggaaacatactcatagtcaccatcagggaggtggagatgctttattcattttttaatggcaaatggatgcagatctcaaagctgcaaagccagagaaagtctctatcaacacctgaggagccaacagctttagacattctactgataaccatccaggatattctatcctatcacaaaaggagtcatcagcgtctctttcctggattatatctgggttacctaaagctctgtagctctgtggatcaaatcaaagttcttgttacccaaaagttgcccaacattctctgccacgtgaagatccgtgaaaacaataatatttctagagaggaatgggaatggatccaaaagctttctggctctgaatctatggaaagtgtggatcatacttctgactgccccatgcaattgttcttctacgagctccagatggcagtgaaagctctccttcagcagatcaatatacctctacaccaggcaaggaacttccgcctctacacacaggaggtgttggaaatgggtcacaatgtgtcctttcttctcctgctccctgcctcagacgacgtctgtacagccccaggacagaataatccttacaccccacactcagggtttcttaacctccctcttcagatgtttgaacttggtatagtagcttgtttcacctagaaatattaacccagcctccttataataaaatcacaaagttatatctgttcccccttgtcccagtggagggtcaataaatcacatgatggctttggcaac

SEQ ID NO: 550 - protein, 763 aa, Homo sapiens
MEASLTRRLLFKDRHFTCSKIIGRRFACFAQRLSHRRKQSQCDLLNESTGQLPTTCSSAASNSINWNCRVKMTQQMQNLHLCQSKKHSAPSSPNAAKRLYRNLSEKLKGSHSSFDEAYFRTRTDRLSLRKTSVNFQGNEAMFEAVEQQDMDAVQILLYQYTPEELDLNTPNSEGLTPLDIAIMTNNVPIARILLRTGARESPHFVSLESRAMHLNTLVQEAQERVSELSAQVENEGFTLDNTEKEKQLKAWEWRYRLYRRMKTGFEHARAPEMPTNVCLMVTSSTSLTVSFQEPLSVNAAVVTRYKVEWSMSEDFSPLAGEIIMDNLQTLRCTITGLTMGQQYFVQVSAYNMKGWGPAQTTTPACASPSNWKDYDDREPRHKGQSEVLEGLLQQVRALHQHYSCRESTKLQTTGRKQSVSRSLKHLFHSSNKFVKTLKRGLYIAVIFYYKDNILVTNEDQVPIVEIDDSHTSSITQDFLWFTKLSCMWEDIRWLRQSIPISSSSSTVLQTRQKMLAATAQLQNLLGTHNLGRVYYEPIKDRHGNILIVTIREVEMLYSFFNGKWMQISKLQSQRKSLSTPEEPTALDILLITIQDILSYHKRSHQRLFPGLYLGYLKLCSSVDQIKVLVTQKLPNILCHVKIRENNNISREEWEWIQKLSGSESMESVDHTSDCPMQLFFYELQMAVKALLQQINIPLHQARNFRLYTQEVLEMGHNVSFLLLLPASDDVCTAPGQNNPYTPHSGFLNLPLQMFELGIVACFT

SEQ ID NO: 551 - DNA, 21 bp, artificial
  Description of artificial sequence: Oligonucleotide
agctctgtagctctgtggatc

SEQ ID NO: 552 - DNA, 21 bp, artificial
  Description of artificial sequence: Oligonucleotide
aggcggaagttccttgcctgg

SEQ ID NO: 553 - DNA, 2281 bp, Homo sapiens
gcgggccgcagccagcgcacccagaccctgcgctgccctcggacggccgggcgcggagccccagctgcggaggccgacggcacccggccccgagcgcctcgacgccgagccgcgcgcgccttctccgccaggcccggcgggcgggagcgggggcgagggagcaggagcggccagtgcccccgacacccccggcccggcacccccggcccggcatcccccgccgccgccgccgccgcctcaaggccgcccgctccccgcaggtggacgcggccatgggccgaggggtgcgcgtgctgctgctgctgagcctgctgcactgcgccgggggcagcgagggcaggaagacctggcggcgccggggtcagcagccgcctcctcccccgcggaccgaggcggcgccggcggccggacagcccgtggagagcttcccgctggacttcacggccgtggagggtaacatggacagcttcatggcgcaagtcaagagcctggcgcagtccctgtacccctgctccgcgcagcagctcaacgaggacctgcgcctgcacctcctactcaacacctcggtgacctgcaacgacggcagccccgccggctactacctgaaggagtccaggggcagccggcggtggctcctcttcctggaaggcggctggtactgcttcaaccgcgagaactgcgactccagatacgacaccatgcggcgcctcatgagctcccgggactggccgcgcactcgcacaggcacagggatcctgtcctcacagccggaggagaacccctactggtggaacgcaaacatggtcttcatcccctactgctccagtgatgtttggagcggggcttcatccaagtctgagaagaacgagtacgccttcatgggcgccctcatcatccaggaggtggtgcgggagcttctgggcagagggctgagcggggccaaggtgctgctgctggccgggagcagcgcggggggcaccggggtgctcctgaatgtggaccgtgtggctgagcagctggagaagctgggctacccagccatccaggtgcgaggcctggctgactccggctggttcctggacaacaagcagtatcgccacacagactgcgtcgacacgatcacgtgcgcgcccacggaggccatccgccgtggcatcaggtactggaacggggtggtcccggagcgctgccgacgccagttccaggagggcgaggagtggaactgcttctttggctacaaggtctacccgaccctgcgctgccctgtgttcgtggtgcagtggctgtttgacgaggcacagctgacggtggacaacgtgcacctgacggggcagccggtgcaggagggcctgcggctgtacatccagaacctcggccgcgagctgcgccacacactcaaggacgtgccggccagctttgcccccgcctgcctctcccatgagatcatcatccggagccactggacggatgtccaggtgaaggggacgtcgctgccccgagcactgcactgctgggacaggagcctccatgacagccacaaggccagcaagacccccctcaagggctgccccgtccacctggtggacagctgcccctggccccactgcaacccctcatgccccaccgtccgagaccagttcacggggcaagagatgaacgtggcccagttcctcatgcacatgggcttcgacatgcagacggtggcccagccgcagggactggagcccagtgagctgctggggatgctgagcaacggaagctaggcagactgtctggaggaggagccggcactgaggggcccagacacccgctgccccagtgccacctcaccccccaccagcaggccctcccgtctcttcgggacagggccccagccgtcccccctgtctgggtctgcccactgccctcctgccccggctttccctgcccctctcccacagcccagccagagacaagggacctgctgtcatccccatctgtggcctgggggtccttcctgacaacgagggggtagccagaagagaagcactggattcctcagtccaccagctcagacagcacccaccggccccacccatcaagcccttttatattattttataaagtgacttttttattactttaattttttaaaaaaaggaaaataagaatatatgatgaatgatattgttttgtaactttttaaaaatgattttaaagagacaaaaaagaacctcaaaaaaaaaaaaaaaaaaaaaaaaaaaaaaaaaaaaaaaaaaaaaaaaaaaaaaaaaaaaaaaaa

SEQ ID NO: 554 - protein, 496 aa, Homo sapiens
MGRGVRVLLLLSLLHCAGGSEGRKTWRRRGQQPPPPPRTEAAPAAGQPVESFPLDFTAVEGNMDSFMAQVKSLAQSLYPCSAQQLNEDLRLHLLLNTSVTCNDGSPAGYYLKESRGSRRWLLFLEGGWYCFNRENCDSRYDTMRRLMSSRDWPRTRTGTGILSSQPEENPYWWNANMVFIPYCSSDVWSGASSKSEKNEYAFMGALIIQEVVRELLGRGLSGAKVLLLAGSSAGGTGVLLNVDRVAEQLEKLGYPAIQVRGLADSGWFLDNKQYRHTDCVDTITCAPTEAIRRGIRYWNGVVPERCRRQFQEGEEWNCFFGYKVYPTLRCPVFVVQWLFDEAQLTVDNVHLTGQPVQEGLRLYIQNLGRELRHTLKDVPASFAPACLSHEIIIRSHWTDVQVKGTSLPRALHCWDRSLHDSHKASKTPLKGCPVHLVDSCPWPHCNPSCPTVRDQFTGQEMNVAQFLMHMGFDMQTVAQPQGLEPSELLGMLSNGS

SEQ ID NO: 555 - DNA, 21 bp, artificial
  Description of artificial sequence: Oligonucleotide
gagatcatcatccggagccac

SEQ ID NO: 556 - DNA, 21 bp, artificial
  Description of artificial sequence: Oligonucleotide
tagcttccgttgctcagcatc

SEQ ID NO: 557 - DNA, 522 bp, Homo sapiens
atgtaagcaaagtagtcattaaaaatacaccctctacttgggctttatactgcatacaaatttactcatgagccttcctttgaggaaggatgtggatctccaaataaagatttagtgtttattttgagctctgcatcttaacaagatgatctgaacacctctcctttgtatcaataaatagccctgttattctgaagtgagaggaccaagtatagtaaaatgctgacatctaaaactaaataaatagaaaacaccaggccagaactatagtcatactcacacaaagggagaaatttaaactcgaaccaagcaaaaggcttcacggaaatagcatggaaaaacaatgcttccagtggccacttcctaaggaggaacaaccccgtctgatctcagaattggcaccacgtgagcttgctaagtgataatatctgtttctactacggatttaggcaacaggacctgtacattgtcacattgcattatttttcttcaagcgttaataaaagttttaaataaatggca

SEQ ID NO: 558 - DNA, 21 bp, artificial
  Description of artificial sequence: Oligonucleotide
actacggatttaggcaacagg

SEQ ID NO: 559 - DNA, 24 bp, artificial
  Description of artificial sequence: Oligonucleotide
gagatctcgagatctcgatcgtac

SEQ ID NO: 560 - DNA, 2383 bp, Homo sapiens
cttttctcttgttgagtgcaaatggagaacagctgctcacgctcgtcgtctgacatcagctatttctcaggatgaccctgcgagacaggccagggtcattagacccaatttggttctcagcaaatatgtgtttattcctgcatgcgtgggccacaggctggtttcttgggtgcaatgaatagctgcaggtttattagggtgtctttttagatggatgtatgtttcccgatgtctatagaacactccggaccccggagagtgaagactctgcctgtcggacttgctttgagaagatccttctccacctccccatggcagaagttgcttcacagaggggaacagttttatggatgtggctgagaccttaaacttgaggcaacccatctgaggtggcatccagaggagactggctggcccctccttcaccttggatgtagtgctgtttctaggatctcttttcaatcagcaaaacaggggatgttccaagagggtgtggattccctgccatcccacatggtcaagtggaggggacgggaaaaagctatgaagggtttgtgaccacacagactctcctggccccctgtccttttggaaagaagacagggatgaaatataatcaagcaattaaccacccccatcatcaccaagaacaacagtatcaacaagaagaacagggacaacaaaacccacggatgaaacattcctttctcagctcagatcttatctggtgcgttctctctctgctctgtcttggtgtgtggtttagagaaacatggacaacgctgtttggaagaacaggtgagcgagggtggggaatttcagaggcctgggcccaccgcctccaccccttccccagtttaacctttgacaggatcttcacctctctctgatcagcattgcttcttgttcaaaggcctcagccacccagctgtgtccctttccccagaaagcaagggcagatggcagtgggtctgttgatgagagaactttaagggcccaatcagtccctgggcaccccctcctgggctcgttttctccaggaggctgcattctgatccataaaccttctcctcggggtttagggtcgagctgttcctgatgtttatcggagactgggatcaaagctatccaggtcataaatctctctctgtggctgttgggccccagggcagctgaagagggttgacagccctttggacctcaaaggaaaaaatgtgctctactccacccactcccagctctgccaagaagctgtcctctgagaagccatggctgggccgttccattctggggagctgctgaaaagagctgggaggccgagaagaacttgcgtgtgctgggggagaggaagcctggccttgagggaggggtgcaggtgtggctcctctgtgtgtgggggctgggggaccttgtgtgccttttccttgtggctgtgaaatgctttatgagtacttccataggaggatggacagggagtcggggagataaactcagccacaaggccccagggcctcaggaaacttgcacccaaccctctcattttacagaagaaaactgtgcctggaaggttgaagggtttgttcccagtcacacaaccagggatccttaggacagccagaccaggaaaccatttccaaactgccaagccatggcagagtatcaagacctcaggaaccatcgagacaccatggaagcattgggaaaagcctccttagcttttgaagctcctcattgttcttgagtgtgcatggagcccatgactgcggggttttgtagacacctcagggattacatgactggtacccctgacaaagtcaaggctgctggacaaaatgagtccgaggatttcaggggcagctgggcgcaggagctggtgggctgttgggagtgcccctttactgggcaggcttccttcctcctggtgatggggggttcctcagcacaaaagtgaaggggtggaggggctggaggagcaggaatctctcttgttgataggtatgaggccttgaagtccttttctttgtcccaggattcatggacgcttcggggctgatctttgagttttcaagcatggggtgcagagacgtttaggtaaactcttaccgtcctctctcttcgtcagggcttcccaggaatcaacaatgcccaagaaggaagggattgtagaaatagcttaaccctttcatttaccaacgtggaaattgaagcccagggaagggaagggaccggtcgtggaagggagagccatcagcagaaagagaccctgagatcttcgcctgggattcccaggaagtccagcccgagctgattcacagaacaaatgcatgcaaaccttgctatcaataaattacacatgcacttacgtaaaaaaaaaaaaaaaaaa

SEQ ID NO: 561 - DNA, 21 bp, artificial
  Description of artificial sequence: Oligonucleotide
cagagacgtttaggtaaactc

SEQ ID NO: 562 - DNA, 21 bp, artificial
  Description of artificial sequence: Oligonucleotide
taccaacgtggaaattgaagc

SEQ ID NO: 563 - DNA, 2336 bp, Homo sapiens
aaaaaaacctatctaaggaggagccaagatggccgcataggaacagctccagtccacagctcccagcgtgagcgacgcagaagacgggtgatttctgcatttccatctgaggtaccgggttcttctcactagggagttccagacagtgggcgcagcaggcttttcttcttggagctgaaacaggcgcactggcgagggttgtgaggaaaggtttgcagccccctgccttggtctgctatagccagtgacacgatcaataccagggtgagcagcagaggaagctcagggaagattatgaagatgagaattcattacctatcaaagaaaatgcgtaaactctagaagtattgcttgctcctttgccacaaagtgtacattcaagagtaaattgtttaaagccaaagggccttgcgccacgtccttagcctcagctttctacttgctaaaatggaaataacaacagtacctaccttacagacctggcgtgaggattaaattataccagcaaagtgcctggcacctagaatttgcctgagttctgatcaatgctaaaaacaccatttaacagtgccctttcctgcctgggaagcccacaaagatttcgcttttcacttattactcatcaaactgactctggttcacagtggaaaagagaagaaaagctgatggagaaatggcagtgaagaaggagaacaaaatgtcagagcaatacttttgagcgacttatcctctgttctgcaatatttgcaaaagtcagtctatagacgtgaagccaacagggaccctcaggcctgtgcatcaggatggtgggctgcctaagtcctctggggacagcagtgccagaaggagtattggacacagtgacccgactgtatgagatgagaaaaaacaaaaacaggaggtccgcagtactgatgaactaatctgtcactcacaagctcaggtctgcaaaaaaaagaaacgaagcactaaacatggccataagagatggaaatgcaagtcttcatttctaaatgataatcaaaccaacgatcagaaactgattaactgtgtaattgaattgaattgaaaatcatcccatgaataacaatccatcctaccttcaaggggttaggaagctaactacaggtaattgctatcagaaatctgatttgatttccaaaaattgtgtgaatgaaccaagtttcttcatcttgatatactaggcagggagtttgttcttccaagtactagactgcttaattgcttgcttgggggaggagaaatcctaggggaaaggcatatatgagcaatttctactctgtgaagccagcgctgtgtcctgagctggatcatggccagaaacagaaaagtctactcttccctacagtggaagcaactgtggatatttcatcctaggagtgaatgaaaaaacctaaagctcatacttcatgggaatctttcaatattctgactgaaaactggttatttgctcctccaacccaaagccatctaggaacagcactcagaacaggaaaaaaaaaagacaaaaataataattattccaaaacgtatttgagcagaaacaaacacaaacatttgcattattaaatgggcttgttcacacctgctgagtagatataagacgatatttaagacaagagctaaaaaataaaccatccctttctggttttgagtgacagcagagcaataaaaattattttcacattcttttccctattgttagaagtaatcatttgagtaaatacacttatctgtgctgtaactattgaaatgaatccacttcaaatatgtataccacctttcttttttatatttctagatatggtttcaatatagactttctgacttttatggtatacatataggacaatattctattcttctttccttttaaatacttactgtttcaatttcaaataaaaaatcagcattctagtttgtacattttagcacagaaatgtttacaaccttcagcacaattgcttttgtaatttactgacttggcattttgaggcgtttttaacaaattatgagaaataacaccttcagaaagcatgtgactactttgatgcaactatttacaatgtattcataagaagtcattaacctgtagagttcttagacatgtggaacctttaacaattatactaaagagtacatacaaaatacagagctatgtaataataactaattttaaatcctgacaaattagaagttaagcctactatctgtaaaaatatgtcctgattcatttttttaagtatatacctgagcctttaaaaagtatatgcctttacaattgatttccaataaacaatactgaataacatact

SEQ ID NO: 564 - DNA, 24 bp, artificial
  Description of artificial sequence: Oligonucleotide
gcaatacttttgagcgacttatcc

SEQ ID NO: 565 - DNA, 23 bp, artificial
  Description of artificial sequence: Oligonucleotide
gatagcaattacctgtagttagc

SEQ ID NO: 566 - DNA, 1187 bp, Homo sapiens
gaacaacatggcttcccccagcgtgagactcgcttgtcctcccaccgcctgctctctcctgatgaccaggttccaggagttatcaaagaacagcctctgagctgcgtggagaaagccatggagacagccagaagaaaacggcaggattagattaacctgtgattcctggctggccacgaggtcacccatggcatggagctgcccacaacgcccttctcagcatgaagcatcctgaaagatccagggccaggttccccaggattggggagttggaagctcattggcactgtcaaatttgaagaagaggcgtgctctgactgcctggacaggacccggaatcaaaccgcaggccctgggtcaccgctgccggaaagagccagttcctgtccgtccatgcacccaccaccaaaacccaggccttcctggaggtgctaggggaggccatgccccttttctgagtgcttggaagtgactgctgcaagtgacaagtgaccacgccttttcccccgcgggtataaattcagaggcgctgcgctccgattctggcagtgcagctgtgggaacctctccacgcgcacgaactcagccaacgatttctgatagatttttgggagtttgaccagagatgcaaggggtgaaggagcgcttcctaccgttagggaactctggggacagagcgccccggccgcctgatggccgaggcagggtgcgacccaggacccaggacggcgtcgggaaccataccatggcccggatccccaagaccctaaagttcgtcgtcgtcatcgtcgcggtcctgctgccagtgagtccccgccgcggtccctggctggggaagagcgcacctggcgccgggagggggcagggagacggggacacggcagggatgcctggccctggtcacctgcggccgggcatgtccgggcaggacgaactcgccgtcggagtcaggggaagaactgggtccccgggctgggcaggagggacccggccgcgagggagcagagaggcggtccccctggctgccccgagcccgcgaagggagggaagttccagaatcgagagagggagggagtcaaggtggaacccatagagtgagcctcctgaagacacagagcggttgcctctctcattaattaattaattagttaataaaattaaccccatgtttaaaaaaaaaaaaaaaa

SEQ ID NO: 567 - protein, 155 aa, Homo sapiens [sequence omitted]

SEQ ID NO: 568 - DNA, 21 bp, artificial
  Description of artificial sequence: Oligonucleotide
ggattggggagttggaagctc

SEQ ID NO: 569 - DNA, 21 bp, artificial
  Description of artificial sequence: Oligonucleotide
agaaatcgttggctgagttcg

SEQ ID NO: 570 - DNA, 857 bp, Homo sapiens
catccctctggctccagagctcagagccacccacagccgcagccatgctgtgcctcctgctcaccctgggcgtggccctggtctgtggtgtcccggccatggacatcccccagaccaagcaggacctggagctcccaaagttggcagggacctggcactccatggccatggcgaccaacaacatctccctcatggcgacactgaaggcccctctgagggtccacatcacctcactgttgcccacccccgaggacaacctggagatcgttctgcacagatgggagaacaacagctgtgttgagaagaaggtccttggagagaagactgagaatccaaagaagttcaagatcaactatacggtggcgaacgaggccacgctgctcgatactgactacgacaatttcctgtttctctgcctacaggacaccaccacccccatccagagcatgatgtgccagtacctggccagagtcctggtggaggacgatgagatcatgcagggattcatcagggctttcaggcccctgcccaggcacctatggtacttgctggacttgaaacagatggaagagccgtgccgtttctaggtgagctcctgcctggtcctgcctcctggctcacctccgcctccaggaagaccagactcccacccttccacacctccagagcagtgggacttcctcctgccctttcaaagaataaccacagctcagaagacgatgacgtggtcatctgtgtcgccatccccttcctgctgcacacctgcaccacggccatggggaggctgctccctgggggcagagtctctggcagaggttattaataaacccttggagcatgaaaaaaaaaaaaaaaaa

SEQ ID NO: 571 - protein, 180 aa, Homo sapiens
MLCLLLTLGVALVCGVPAMDIPQTKQDLELPKLAGTWHSMAMATNNISLMATLKAPLRVHITSLLPTPEDNLEIVLHRWENNSCVEKKVLGEKTENPKKFKINYTVANEATLLDTDYDNFLFLCLQDTTTPIQSMMCQYLARVLVEDDEIMQGFIRAFRPLPRHLWYLLDLKQMEEPCRF

SEQ ID NO: 572 - DNA, 21 bp, artificial
  Description of artificial sequence: Oligonucleotide
agttcaagatcaactatacgg

SEQ ID NO: 573 - DNA, 21 bp, artificial
  Description of artificial sequence: Oligonucleotide
tagaaacggcacggctcttcc

SEQ ID NO: 574 - DNA, 4415 bp, Homo sapiens
agagaagcaacatctttaaggtactgagggcaggagaagttaatgtagaatactatgccagaaaaaataaattcccaaaagtggaagtgaaataaggacatttagagatgtacaaaagctgaccgaattcactaccagtcaacccacactacaagaaacatcaaatgagtcctccaagcagaaggaacccaataccagatgaaaatccagatctccacgaggaaatgaagaacaccagaaatggatcggccctttcttcaaataagagcagttggaataacaaagctgttcagttgtacccttggaatccactgaaatcctgggtagggaagctccagtaccaccaactggaaagactgggaatgcctaatagctggtactggccattgtcgtaggctttgtccactctgacaaactgaagatggggactcgactcaccttcgccagccacaggaggacctccagacgaggttaggtcgacttcccgataactttagatcctgaaacctcacgggatttttcttctcttccctttgatctctcttccgcttgctcaacaggacaggactcgctgcctttctttcccgtcagaaagggatcccttgcggacaggacctaagtgagtagctggtttcccctacttgtccttccgggcctgggtgtctcgggagctcaggctgacgggagacctaactaccggcgagtgagaccagcaggagcctggaggggcgcgcaccagggtggaggtttggtgccgggggttgagaacaacagtcaaaccctcttcttcccctggcaccacgcacctgccccccgggacgccgaacgaagtggtccctaaagctcctctgcaggcccaaccgaaacaggcctgaagctccaggatgggcgagaggatcctctttgagcgaaaccagccttctgcctggctggccctggtcaacaccctgggaagaggccgatttggcggacagaacggaagaaaagacctaaaggtagaatctcatgatgtcgagatgttaaaacactcaaattttaaggttcgactgtgagggggagatagggggtctcgagcaggatcgacccctgagccttcatctgcagagtcctgtgcaccagctcagaggacaggactatgtgcaccaatggttctcatcaggcggcaacttcaccctcacatgcctcccccatccctgctggtacacaagaccacgactaggggaagcccggagggagaatgttaacccctggcatctatctagtcagcagaggtgagggatgctgctaaacaccttacaatccaccggaggacacccgcccccaccgaccccgaagtagccattccctggaggtggggaaactcgcctgtagatcaatgcccacgcacttggcggacaggaaatcacgaattggccactaactggatcttggatctgaggaaaaaattccagcgtcagagggaactctcggagatttgcccagagcataaggaacgtactccttccctcagtgatggatcatcacatctgggggaaatcatagacaatttcttttgtagggcgaactctgctatacagtttatgatgtcagagtgaatactttctttgagttgcagtcagaaactgtagatttttaaaaatttaaaattcattattctctgtcagtatttcaaagtgtatacagaaagctattgcactgttcaggagatggcgcctaacattttggaaattcaaggtgatgaatgtccagataagactatctctcctggtacaaagtttgacaatgctgaacatttttaaaggttctttttgatatacaaagtgcaccaatgagtgctttttaattcttacaataattctgggtgaggtaggtatttttccaattcccattttatgcttcggtagccctttgtatttatacttcaaaacacttggctctcttgtaattatttaagaaattagttgtgattatttgtttaatgtgcaggagttacaaaaggcaagcgttagaacaagacagacctggttatgattcctggctctgaaagctgtacaccctgtgaccctagacaggtgttttaatgcctcgctgcctctgtttcttgctctgtaaaatgtgaacaataacagtattggcctcatgctttttttgggttttaaaagtaataatgtggacaaagatcagtggagtgcctggcatgctgaacccattccatgactgatagctatagttgttatgatttgtatcaatccattttcacactgctataaggaactacctgagactgggtaatctatgaagaaaagaggtttaattgactcacagttctgcatggctgggagtcctcaggaacttacaatcatggcagaaggggaagcaagacatttcttatatggcagcaggacagaaagagagagagtgaagggggaagtgccacacacttccaaacaaccatatcttgtggttaattaaaaagtactcattggtgtgccttgtatagaaaaaaatatacactcactatcatgagaacagcaaggagggagtctgcccccaaggttcaatcacctcccagtagacccctcccctgacatgtggggattacaattcaagatgagatttgggtggggaaacagagtcaaaccatatcgtgattgttctataataaagagatgcccacatgtgtttcatcagggacagtgctcattaaccagttgtcctgccgtaattattaatagtatcccctttgctttcaaaagtgtcctagtttacaaaaagtatagaaatggaggacagaatagtggttgcccaagattggaaaagggtaagggtaaagggtgcagaggtggatgtggttataaaaggcaacatgggagatcctcgtagtgaaggaaccgtttagtatctccactgtggtggtagatacccgaacctaaacatgtgaaaaattgcatgaaactaaacacacacaccaacaagtacaagttaagttaggaaaatccaaataagatttctacattgtatcaataggtatatcttgattatgatattgcaagatggtactattcaaggaaactgggtagaggctacatgagactcccctgtattatttcctataactccatgtgaatctacaaggatctcaggattaaggaagatatcctagtttggaagataaaaaatatatcccagtagtaatatccactgtcccaccagggcctgactaccttctataaaaagaagtgcctttgttcccctcaagttcctttatttggttttattcttcttcacagtacctacctccacttggcagattacatttattttttcatctttcaacagctatttactgaatgcctactagatgccaggcttgagatctagcaatgaacaagatctctgtgaaacttacattccaggaggagaaataaataataaaccaaaaatataatcagtaaattatttaatatgctgggaaacaatatgtgtaatggaagaaatatgtaaagtgatggattagggttctccagagaaacagaaccaacaattgactcatgtgattatggaggctgagaagtctcaagatcacagttggcaagcttgagacacaggagagcccatggtgtgtttctgatttgagtccaaaggcctgagaaccaggagagatgatggtgtgattacagttcaaaagctggcaggcttgaggcccaggaagagccagtgttgcagttcaattccaaaggcaggaaaaggctgatatcttagctgaagcaatcaggcagaaggagctctctcttactcatgggcaggtcagacttttggttctattcaggcctttaagtgattggatgaggatcatctactgtggaaagaaataagctttattcagtgtactgattcaaatgttaatctcatccaaaaccatgctcacagacacacccagcataatgtttgaccaagtatctgggcaccttgtggttcagtcaaattaacacatattaactaccttagcaagatgaaaagcagtgaatgcaggatggtggttgaaattttaaatacgttggttatatagtctcattgaaaaaggaacatttgagtgaagacttgaaggggtggtggaataaaccatttatttgcttattgcctgtctccctctatcagaatgaaagcttcatgaagcgagagacttaatttttatctgttatatccctagtgcctggtgcagggtaagtactcaaaaatatttgttgagtgaataagtaatgattgaggatggggactggtttgtatctggttatatctcttgtccttagcacagtacctggcacatcctaagccatccaaaagagttggttatatgattgtctttgaattctatgactgtttataatatacagtaaacttcactgaagacactg

SEQ ID NO: 575 - DNA, 22 bp, artificial
  Description of artificial sequence: Oligonucleotide
gaagaacaccagaaatggatcg

SEQ ID NO: 576 - DNA, 21 bp, artificial
  Description of artificial sequence: Oligonucleotide
cttcagtttgtcagagtggac

SEQ ID NO: 577 - DNA, 484 bp, Homo sapiens
tgtcagctttgtctgtgcctcgcaaatcagaggcaagggagaggttgttaccaggggacactgagaatgtacatttgatctgccccagccacggaagtcagagtaggatgcacagtacaaaggaggggggagtggaggcctgagagggaagtttctggagttcagatactctctgttgggaacaggacatctcaacagtctcaggttcgatcagtgggtcttttggcactttgaaccttgaccacagggaccaagaagtggcaatgaggacacctgcaggaggggctagcctgactcccagaactttaagactttctccccactgccttctgctgcagcccaagcagggagtgtccccctcccagaagcatatcccagatgagtggtacattatataaggattttttttaagttgaaaacaactttcttttctttttgtatgatggttttttaacccagtcattaaaaatgtttataaatcaaa

SEQ ID NO: 578 - DNA, 21 bp, artificial
  Description of artificial sequence: Oligonucleotide
cagccacggaagtcagagtag

SEQ ID NO: 579 - DNA, 24 bp, artificial
  Description of artificial sequence: Oligonucleotide
ccactcatctgggatatgcttctg

SEQ ID NO: 580 - DNA, 592 bp, Homo sapiens
  misc_feature (62)..(62): n is a, c, g, t or u
ggtgcatgttcattgggcatcttccattcgacccctttgcccacgtggtgaccgctgggganctgtgagagtgtgaggggcacgttccagccgtctggactctttctctcctactgagacgcagcctataggtccgcaggccagtcctcccaggaactgaaatagtgaaatatgagttggcgaggaagatcaacatataggcctaggccaagaagaagtttacagcctcctgagctgattggggctatgcttgaacccactgatgaagagcctaaagaagagaaaccacccactaaaagtcggaatcctacacctgatcagaagagagaagatgatcagggtgcagctgagattcaagtgcctgacctggaagccgatctccaggagctatgtcagacaaagactggggatggatgtgaaggtggtactgatgtcaaggggaagattctaccaaaagcagagcactttaaaatgccagaagcaggtgaagggaaatcacaggtttaaaggaagataagctgaaacaacacaaactgtttttatattagatattttactttaaaatatcttaataaagttttaagcttttctc

SEQ ID NO: 581 - DNA, 21 bp, artificial
  Description of artificial sequence: Oligonucleotide
attggggctatgcttgaaccc

SEQ ID NO: 582 - DNA, 21 bp, artificial
  Description of artificial sequence: Oligonucleotide
tttcccttcacctgcttctgg

SEQ ID NO: 583 - DNA, 2514 bp, Homo sapiens
actggggtcttctccatgcggctcgggctatgacagcctccgtgctcctccacccccgctggatcgagcccaccgtcatgtttctctacgacaacggcggcggcctggtggccgacgagctcaacaagaacatggaaggggcggcggcggctgcagcagcggctgcagcggcggcggctgccggggccgggggcgggggcttcccccacccggcggctgcggcggcagggggcaacttctcggtggcggcggcggccgcggctgcggcggcggccgcggccaaccagtgccgcaacctgatggcgcacccggcgcccttggcgccaggagccgcgtccgcctacagcagcgcccccggggaggcgcccccgtcggctgccgccgctgctgccgcggctgccgctgcagccgccgccgccgccgccgcgtcgtcctcgggaggtcccggcccggcgggcccggcgggcgcagaggccgccaagcaatgcagcccctgctcggcagcggcgcagagctcgtcggggcccgcggcgctgccctatggctacttcggcagcggctactacccgtgcgcccgcatgggcccgcaccccaacgccatcaagtcgtgcgcgcagcccgcctcggccgccgccgccgccgccttcgcggacaagtacatggataccgccggcccagctgccgaggagttcagctcccgcgctaaggagttcgccttctaccaccagggctacgcagccgggccttaccaccaccatcagcccatgcctggctacctggatatgccagtggtgccgggcctcgggggccccggcgagtcgcgccacgaacccttgggtcttcccatggaaagctaccagccctgggcgctgcccaacggctggaacggccaaatgtactgccccaaagagcaggcgcagcctccccacctctggaagtccactctgcccgacgtggtctcccatccctcggatgccagctcctataggagggggagaaagaagcgcgtgccttataccaaggtgcaattaaaagaacttgaacgggaatacgccacgaataaattcattactaaggacaaacggaggcggatatcagccacgacgaatctctctgagcggcaggtcacaatctggttccagaacaggagggttaaagagaaaaaagtcatcaacaaactgaaaaccactagttaatggattaaaaatagagcaagaaggcaacttgaagaaacgcttcagaactcgttgctttgcccagataatgataataatgcttaataataattgaagaatgggaaagagaaagagacagagactggcattttcctctcccgaaggagatctctttctctttaatggaatctacaactgttttaaaactttaagaaaggtaaagactgccagttcttccgccaaccccatcagcccagcccgttaaatgtcaaacgtcaacccccaaaatacgcaatttcagataagttacgcagttactgaaatcttgtaagtatttaagtgatcgttacattttaggacactgcgttagatggtaataatctggaagttggttacaaacgcaagaggccattgtaaacatctgcttgtccttcttaggtcgccattccctttgcatgttaagcgtctgctcaggtaaatcttagtgaaattcctaccgttgttgtacgttctgcaaaacattttatgtatagatttagaggggaaacgagaaggtactgaaataatgatcttggaatatttgctgtgaagggagaaagggagagaaaactcttctgaggatcatttgtcttggtagtatagtaaaaccaaccagctgaacctttcaggctacaagagaacccgggtcggtaatgtctttttaagaataatttttaattgcttataacaagcatattttgtggcatttgaactatatttactgctccaatatccgttattttccaaaggattttgtatctttttgaaaatgtttacatcatcagatgatccacagaattcactttatgtgagatctcccgagagtttccatcccaacataatggactttggtttgaacacaattcgttttttcatttgaattggcatttcccaatatttgctaaacatttgctggagaaatcatttttcttttttcttttttagaaaactcagaatgaaaattcattcccctgaaatatttaggtgtctatattctatattttgatctattaagggattagtatttttccatgtttattgtgttatcagagtgcattagaaagattagtgattcatcttcacagcacatttttaatcaagcagttatttcaaccagcacattcgttttgttcatattcactatagaatgatatcttgtaaataaagacattcagcacactgtgaaaatgtatttgtgcacctgctttttaaatatttctactaaaaatgaaaaaaaaaaacccttagacctgtagatagtgatatcgtaatattaattgttaataaaatagtcactgcc

SEQ ID NO: 584 - protein, 388 aa, Homo sapiens
MTASVLLHPRWIEPTVMFLYDNGGGLVADELNKNMEGAAAAAAAAAAAAAAGAGGGGFPHPAAAAAGGNFSVAAAAAAAAAAAANQCRNLMAHPAPLAPGAASAYSSAPGEAPPSAAAAAAAAAAAAAAAAAASSSGGPGPAGPAGAEAAKQCSPCSAAAQSSSGPAALPYGYFGSGYYPCARMGPHPNAIKSCAQPASAAAAAAFADKYMDTAGPAAEEFSSRAKEFAFYHQGYAAGPYHHHQPMPGYLDMPVVPGLGGPGESRHEPLGLPMESYQPWALPNGWNGQMYCPKEQAQPPHLWKSTLPDVVSHPSDASSYRRGRKKRVPYTKVQLKELEREYATNKFITKDKRRRISATTNLSERQVTIWFQNRRVKEKKVINKLKTTS

SEQ ID NO: 585 - DNA, 24 bp, artificial
  Description of artificial sequence: Oligonucleotide
tctggaagtccactctgcccgacg

SEQ ID NO: 586 - DNA, 21 bp, artificial
  Description of artificial sequence: Oligonucleotide
tgtgacctgccgctcagagag

SEQ ID NO: 587 - DNA, 8769 bp, Homo sapiens
atttagaggcggcgccagggcggccgcggagaaacgtgacacaccagccctctcggaggggtttcggaccgaagggaagaagctgcgccgtgtcgtccgtctccctgcgcgccgcgggcacttctcctgggctctccccgaactctcccgcgacctctgcgcgccctcaggccgccttccccgccctgggctcgggacaacttctggggtggggtgcaaagaaagtttgcggctcctgccgccggcctctccgcctcttggcctaggaggctcgccgcccgcgcccgctcgttcggccttgcccgggaccgcgtcctgccccgagaccgccaccatgaacaagctttacatcggcaacctcaacgagagcgtgacccccgcggacttggagaaagtgtttgcggagcacaagatctcctacagcggccagttcttggtcaaatccggctacgccttcgtggactgcccggacgagcactgggcgatgaaggccatcgaaactttctccgggaaagtagaattacaaggaaaacgcttagagattgaacattcggtgcccaaaaaacaaaggagccggaaaattcaaatccgaaatattccaccccagctccgatgggaagtactggacagcctgctggctcagtatggtacagtagagaactgtgagcaagtgaacaccgagagtgagacggcagtggtgaatgtcacctattccaaccgggagcagaccaggcaagccatcatgaagctgaatggccaccagttggagaaccatgccctgaaggtctcctacatccccgatgagcagatagcacagggacctgagaatgggcgccgagggggctttggctctcggggtcagccccgccagggctcacctgtggcagcgggggccccagccaagcagcagcaagtggacatcccccttcggctcctggtgcccacccagtatgtgggtgccattattggcaaggagggggccaccatccgcaacatcacaaaacagacccagtccaagatagacgtgcataggaaggagaacgcaggtgcagctgaaaaagccatcagtgtgcactccacccctgagggctgctcctccgcttgtaagatgatcttggagattatgcataaagaggctaaggacaccaaaacggctgacgaggttcccctgaagatcctggcccataataactttgtagggcgtctcattggcaaggaaggacggaacctgaagaaggtagagcaagataccgagacaaaaatcaccatctcctcgttgcaagaccttaccctttacaaccctgagaggaccatcactgtgaagggggccatcgagaattgttgcagggccgagcaggaaataatgaagaaagttcgggaggcctatgagaatgatgtggctgccatgagcctgcagtctcacctgatccctggcctgaacctggctgctgtaggtcttttcccagcttcatccagcgcagtcccgccgcctcccagcagcgttactggggctgctccctatagctcctttatgcaggctcccgagcaggagatggtgcaggtgtttatccccgcccaggcagtgggcgccatcatcggcaagaaggggcagcacatcaaacagctctcccggtttgccagcgcctccatcaagattgcaccacccgaaacacctgactccaaagttcgtatggttatcatcactggaccgccagaggcccaattcaaggctcagggaagaatctatggcaaactcaaggaggagaacttctttggtcccaaggaggaagtgaagctggagacccacatacgtgtgccagcatcagcagctggccgggtcattggcaaaggtggaaaaacggtgaacgagttgcagaatttgacggcagctgaggtggtagtaccaagagaccagacccctgatgagaacgaccaggtcatcgtgaaaatcatcggacatttctatgccagtcagatggctcaacggaagatccgagacatcctggcccaggttaagcagcagcatcagaagggacagagtaaccaggcccaggcacggaggaagtgaccagcccctccctgtcccttcgagtccaggacaacaacgggcagaaatcgagagtgtgctctccccggcaggcctgagaatgagtgggaatccgggacacctgggccgggctgtagatcaggtttgcccacttgattgagaaagatgttccagtgaggaaccctgatctctcagccccaaacacccacccaattggcccaacactgtctgcccctcggggtgtcagaaattctagcgcaaggcacttttaaacgtggattgtttaaagaagctctccaggccccaccaagagggtggatcacacctcagtgggaagaaaaataaaatttccttcaggttttaaaaacatgcagagaggtgttttaatcagccttaaaggatggttcatttcttgaccttaatgtttttccaatcttcttccccctacttgggtaattgattaaaatacctccatttacggcctctttctatatttacactaatttttttatctttattgctaccagaaaaaaatgcgaacgaatgcattgctttgcttacagtattgactcaagggaaaagaactgtcagtatctgtagattaattccaatcactccctaaccaataggtacaatacggaatgaagaagaggggaaaatggggagaaagatggttaaaatacataataatccacgtttaaaaggagcgcacttgtggctgatctatgccagatcaccatcttcaaattggcacaactgaaatttccccactctgttggggcttccccaccacattcatgtccctctcccgtgtaggtttcacattatgtccaggtgcacataggtggtattgaatgctcagcagggtaggggctgaccactgtccctgattcccatcgttctcaggcggattttatatttttttaaagtctattttaatgattggatatgagcactgggaaggggacgctaactccccttgataaagtctcggttccatggaggacttgagtggccccaaaggctgccacggtgccctcaccccagcccatgtgctcccataagggctggttcctagaggcaggggttgtggggcactcccagccacggcactgttaccttggtggtgggacttggaacccaaccctgagctcccgataaagctaaagtccatcatctggcaaattcagtaaattggagagtacttgcttctgtttgtatctgagaggaatttttaactgacggcttctgtctccatgaatcattatcagcatgatgaaaggtgtgtctaaaaaacaattcagaataccagcagcattgtacagcaaggggtaaataagcttaatttattaatttaccaggcttaattaagatcccatggagtgtttagcccttgtgggagacagaagccatcagttaaatgaggttaggcctctcctcctaatatactgattgacaatgcatattagccaggtaatgcactttagctaccctggacaatgctatcaagtgtgctgggaagggaggaaggcctctctacatatggaaaagcccatgcgtggagttcccctcctttcaacattgcaacaacagtaacaacaagacaaccgcaacatgtgggcgtagtcaggcaatgctgtgtgcgaagtaaactacctcaaggtatgaagttacctcagcaattattttcctttttgttccccccaaccccattaaaaaaatttttttttgatttttgtttttttgcagcttgctgatattttatataaaaaagaaaagcaaagcaaaagagaagctgatagtcttgaatattttatttttttaatgaaaagaaaaaacaagaaagttatgtttcataatttcttacaacatgagccagtaaccctttaggaactctctatggagaacaggcctggtgggaaaggctttgggggctgcccccttaggaggaggctagtgctaagagggaaggcccaggtttgagagagcccagaggggcagagcccagagccttgtttggccctgatctctgacttctagagccccagctgctggcggctgctggaatatcctacctgataggattaaaaggcctagtggagctgggggctctcagtggttaaacaatgcccaacaaccaaccagctggcccttggtctcctctctttcctcctttggttaaagagcatctcagccagcttttcccaccagtggtgctgttgagatattttaaaatattgcctccgttttatcgaggagagaaataataactaaaaaatataccctttaaaaaaacctatatttctctgtctaaaaatatgggagctgagattccgttcgtggaaaaaagacaaggccaccctctcgccctcagagaggtccacctggtttgtcattgcaatgcttttcattttttttttttgttattgtttcatttcagttccgtcttgctattcttcctaatctatatccatagatctaaggggcaaacagatactagttaactgcccccacctctgtctccctgtcttctttagatcggtctgattgattttaaaagtggacccaaacttagggaattcttgatttagggtggctggtggcaaggaggggcaggggatatggggacgtgactgggacaggttcctgccttatcattttctccctaggacattcccttgtagcccccagaattgtctggcccaaattgaatagaagcagaaaaacatttagggataacatcaggccagtagaattaagcctctccacctgtcccaaccataaaaagggtctcccagctttccatctctggctctatatgctttatcccaaaacaaagcagataacgttcagacgtcggccatttagtaatttaaagcgaatttccagcagcaagcatgctttgatatctggttcagactatcatcaggaagaaaaaaaaatcccacagtacctgaaatgtgattgttgcagtgttcagtttccttgggggcctgctcccttcacaccttgagcccaagtccttttccgttggctgattcagctcccagaagagacgaggaagtgtgtggcaagggactggaaaacttcacttgcttggattaggcaaggctccactcattgttgatatttgcccagcaggaaaatcatgtaagttataccaccagaaagcaaaaggagcatggtttggtggttaaggtttagtgggatgaaggacctgtcttggtgggccgggccctcttgtgccccgtaggctaggtcttagggcaactccttgccctcctgctcagcacctccatttccccatccttggtgagataacaagctatcgcgaaaagcacttgggagatttggatgatttgagaagagtgacttaaaaaaaatgcttctgtgctctaagatatatatgtgtgtgtgtgtgctacatatatatttttaagaaaggaccatctctttaggatatatttttaaattctttgaaacacataaccaaaatggtttgattcactgactgactttgaagctgcatctgccagttacaccccaaatggctttaatcccctctcgggtctggttgccttttgcagtttgggttgtggactcagctcctgtgaggggtctggttaggagagagccatttttaaggacagggagttttatagcccttttctactttcctcccctcctcccagtccttatcaatcttttttcctttttcctgaccccctccttctggaggcagttgggagctatccttgtttatgcctcactattggcagaaaagaccccatttaaaacccagagaacactggagggggatgctctagttggttctgtgtccattttcctctgtgccaaagacagacagacagaggctgagagaggctgttcctgaatcaaagcaatagccagctttcgacacatacctggctgtctgaggaggaaggcctcctggaaactgggagctaagggcgaggcccttcccttcagaggctcctgggggattagggtgtggtgtttgccaagccaaggggtagggagccgagaaattggtctgtcggctcctggttgcactttggggaaggagaggaagtttggggctccaggtagctccctgttgtgggactgctctgtcccctgcccctactgcagagatagcactgccgagttcccttcaggcctggcagacgggcagtgaggaggggcctcagttagctctcaagggtgccttcccctcctcccaacccagacataccctctgccaaactgggaaccagcagtgctagtaactacctcacagagccccagagggcctgcttgagccttcttgctccacaggagaagctggtgcctctaggcaaccccttcctcccacctctcatcaggggtgggggttctcctttctttcccctgaagtgtttatggggagatcctagtggctttgccattcaaaccactcgactgtttgcctgtttcttgaaaaccagtagaagggaaacagcacagcctgtcacagtaattgcaggaagattgaagaaaaatcctcatcaatgccaggggacataaaagccatttcccttccaaatactcgacaatttagatgcagaacatttctctgtattcagacttagagtaacaccagctgaaaactgcagtttctttcctttggatacataaggcttctctatcggggtacgggacagggaggaggcctcatgtctgaagggggatttaggggcgagagccccagccctgaccctcggtcctgtgcaccgctttggggcacagtctgatggcgcctttgctggcgccttagtatggttgactccggatggacaaaagaaaaaaaattttttttcttgaatgaaatagcaggaagctcctcgggagcatgtgttttgattaaccgcaggtgatggatgctacgagtataaatggattaactacctcaatccttacagtaagattggaactaagggcagggactcatgcataagggtatgaatcccagccaggacaagtgagttgaggcttgtgccacaaaaggtttgtccttggggaacaggcaggcctgccaggatcccccccatatcgattgggctgggagggctggccatgaggtccccactttctgctttccttgcccatgtgtcacccctttggcctccagcttgtccctctctcactttctatagctttgttggaccagatggtgaggaaaggaatggcctcttcccttctagagggggctggctggagtgagacctggggcttggcctggaacccaccacacagccccaaagtcaggaagcctggggaaaccagagctgagacctcttcaacagggtttctttgagatcctacacctccattgggccctttttcagtcttcaatgggggcccagttggctctagaaggagaagaggtgaagcaggatcctttgccctgggggagtctgagggcgcggtccttggactcattcaggccgtctttgtagttgggggagttccactgggcgatcccagcccctccccacccaccctctaatggacctcctcatagaagccccatttcacttttgttttatctacctcttagcaaaacaatagataaattaggtagtggcagctccacttgcttaggttagggggggaaaaagatttctttttccaaaggaaaaaaatattaccttgagaatactttccaaaaaataaaattaaaaaaaaaaaaaccaaaaaaaaaaatttttttttaaaagggagacattttccagtgaccactggattgttttaatttcccaagcttttttttcccccataaataagtttcactctttggcgattttcttcacttgtttaagataacgtgctagctattccaacaggtaacagctttcacagtctgcccctggcctgtctcaccccatcccccaccctattcctgccagtgagtccttcctgtgcttctctcccttctcccctcccagccagctgacttcagtcacccctgtcccccctcccctgccaataagctcccccaggaataaaggctttgttttggggatgcttaaatcttgactggcacttcccggctgtgggggctggggagccacttgtaacatttctgtgcagattttatgttagccactgctatgtaaaagcacgttcaaaatgaatttcagcagattatgtgttaccataatgaataaacgtcctctatcaccatttggagtctcccttttctccaggatcttgatcctggtccccaaaaccagagtgaatcaaaagagcttcctcccctgaggcaaagtggatttgtaagcagttctgaaacatcacttactcagaagagggaacgatgtattttgatgagtgcaaattgggaagagctggaggcctactgcttgggacagttttttttttttttttttttttaaatatgagtgctagcttattctgtaattgcggcaactttgaaaattgtattttactggaaatctgccagccatcaccacccgattttgattgtatccttcctcccatcctttaatctgttcattgctttgggggaggtggggcagctggctcacacgttggagtttgttctttgatggatgaacgaacactccagttttctttcccgtgaaggttgtttcagccacaaaccacttcattttgctgtttcaatttcaaaataaaaggaaacttatattgaaagacaa

SEQ ID NO: 588 - protein, 577 aa, Homo sapiens
MNKLYIGNLNESVTPADLEKVFAEHKISYSGQFLVKSGYAFVDCPDEHWAMKAIETFSGKVELQGKRLEIEHSVPKKQRSRKIQIRNIPPQLRWEVLDSLLAQYGTVENCEQVNTESETAVVNVTYSNREQTRQAIMKLNGHQLENHALKVSYIPDEQIAQGPENGRRGGFGSRGQPRQGSPVAAGAPAKQQQVDIPLRLLVPTQYVGAIIGKEGATIRNITKQTQSKIDVHRKENAGAAEKAISVHSTPEGCSSACKMILEIMHKEAKDTKTADEVPLKILAHNNFVGRLIGKEGRNLKKVEQDTETKITISSLQDLTLYNPERTITVKGAIENCCRAEQEIMKKVREAYENDVAAMSLQSHLIPGLNLAAVGLFPASSSAVPPPPSSVTGAAPYSSFMQAPEQEMVQVFIPAQAVGAIIGKKGQHIKQLSRFASASIKIAPPETPDSKVRMVIITGPPEAQFKAQGRIYGKLKEENFFGPKEEVKLETHIRVPASAAGRVIGKGGKTVNELQNLTAAEVVVPRDQTPDENDQVIVKIIGHFYASQMAQRKIRDILAQVKQQHQKGQSNQAQARRK

SEQ ID NO: 589 - DNA, 21 bp, artificial
  Description of artificial sequence: Oligonucleotide
atttctatgccagtcagatgg

SEQ ID NO: 590 - DNA, 21 bp, artificial
  Description of artificial sequence: Oligonucleotide
gtgggcaaacctgatctacag

SEQ ID NO: 591 - DNA, 5016 bp, Homo sapiens
taacattctgttcttccgcgtgatggattttcttttggagattcgaactgaagcctgtacggaggaaatgttgtttttaagggaaatgaatagaaacaatccactttgaagaagccatggcgaaatcaaagacaaaacatagactttgttctcaggaatcttcagtatctgccctgctggcaagctgcaccctgagtggtagtaattcctctaattctgatggctcgtttcactataaagataagctgtacagatctgcttctcaagctctacaggcttatattgatgattttgatctaggccaaatatatcctggtgcaagcactggaaaaattaacattgatgaggattttactaatatgtcacagttctgcaactatatttacaaaccaaacaatgcttttgaaaaccttgatcacgaaaagcactcaaacttcatatcctgtagaagacacatcgttaatgacatagactccatgagcctaacaactgatgatctattaagactcccagcagatggatcattttcttatacttatgttggaccgagtcaccgaacgagcaagaaaaacaagaaatgccgtggaaggctgggttcattggacattgagaagaatccacattttcaaggaccctacacttccatgggcaaggataactttgttactcctgttatacgctcaaatataaatggaaagcaatgtggtgacaaaattgaattgcttatcttgaaggccaagagaaatctagagcagtgtactgaagaattaccaaagtccatgaaaaaggatgacagtccttgctcattagataaacttgaagcagacagatcatgggaaaatattcctgttactttcaaatctcctgttcccgttaactctgatgatagtcctcaacaaacttcaagggcaaagagtgctaaaggggttcttgaagactttctaaataatgataatcagagctgtactctctctggaggcaaacatcatggtcctgttgaagccctgaaacaaatgttatttaaccttcaagcagtacaagaacgttttaatcaaaataagaccacagatccaaaagaagagattaaacaagtttcagaagatgatttctctaaattacagttgaaggaaagtatgattcctattactaggtcacttcagaaggctttgcaccatttatctcgcctgagagacctggttgatgatacgaatggagaacggtcaccgaaaatgtgaagaggaaaatgaaactgtcaccacgataaatagtcaccacagaacaaataggcattttttctattacttaaactgacaaagtaaatataagccatacattattttgtggttggttcaaggattatatatttctaaaacactaaacttgaaaatacccataggttttgggacctatctttattttgtgccaacatactagaatgtgaactgcaaggacccacaatgtatcctgaagtcttactttcgccttctggccagcaaatgtctaatatttaaagatggatgacttctgttcttgaagcttacctggatttaaccttcttcagcatcctcaacattttattacctggttcaggatcattaagaaacttactggtttttatccaaaatcttttacgttaaatagacttttttaaagatatagttagcatcacttttaaacagcttaaaggaatatcaaaattgttattgtgtatctcatctataaggaagtctgttactttgaaattttcataaatttaatatttaagatacattgtatttgaaaattgcattaatagtggggtgatactgtgttaaaaggaacgttgtgttgtgacattcaagagaacctcctcatttaattagtactttgattctgtgtaagataatcttggtagtgcttgacagtttccaaacctttttttggagagatatttaagaatttaatattttgatattagattgtttcccagattttaattttggggttggctcaaactagtgaaaactatgactcaatggccaattgctttatcaaatttgataactaaaacttaaaatgaatatggaaaatcagaaagcaactctattttagagctattttgtaagagttgtgctttctttaacaccatctgtagtcttaagtttgtctctagctagaactgaacaaagctctataatttttaccaagcacttattattaatacttcttataagtagtaagcatctttactaacacaactgagaattaagtcataaaacataactaatacagcacattactgcctgacaaaattaaagagtactgtgtgtatgtataactactacaggttaacacttcacccaaatgatagcgtttttcctcagtagattattgtcaaataggaatttctaagcacattgagtcaaagcattttttccaggttaataaagtgttatttactatctttgttagaggtgacatgtcaaacactacagtgagctctgtggggtttttttttttttttttgcccgtgagttttttaccatgctgctctgaccagtttgagtggcaattaccaatagatttgttttctttattctatggagatgtttttaccactgacactgttttctgattatagtctgcttcatagaaaatagcctgcataatcaaacaaggagttactttgaaattaaagtatgcctggctattaaaaatgcagattttaggtgggtaaacatcaggtaggtctgggtgggtcatgttctaggcctagaaaaatacactattagacaagttctaaagaaggcaaggagataaaggcatcaggtggtaacttctaattgaatattatatgttgatcatacataatatatactatgcctggaaattatgactgaaaagcacctattcggttagtgctcctattcatgagaacatatctccaatactaaatgagataagcctgttctaaaatcttatagccagtattttaagaaacttgattatacttaccaaaggaacattgtttgttttctcttgttttaaatatggagaggtttaatcctttacataacaaaggaattaattttagcaaaatgattcattccaaccttcttataagaaatatctaggagagtcaagtaagaaaaataacgaatctaagtgataaacattcaagaaattctctaaataagagatttatttataattttaatatctcagggttctttttaggtttccaggggaaaagagcaggataacagtgtggagactgctaagttgagaatttaaaacaaatgagaacataagatttttaaaattgcattgtgaatgtaaaatttttatcaatcctttgctcttttagacatattgagaaaatgttaaatagaaaaaattaagaaattttaataagatgtttcagatctttgagtatgaaaaacataacaaaaaagcctaatttcaaaaaactatttgagatcaagggacaatggtgtgaccaatatgaagggtcaagactgaaatgtattgtctttactatcaagaactctactttcagttgtttctcagacagttaatttcagcttcatagagatttctgagcaaattaagaaacactgttttcctgggtttgttttgggtatatgtcattatagttatgttatttcttgttgaaatttataattgtaggttttttgtattgttttggtatttaatggtgtataatgtgttattacattatatgtagttataccaaaatattgcctgaagagaaatcatgacaaggtcccctgtttattcctgtgttacagacgcatggaattgctcctgtagatttgaatttttgtttcatttttttctgtcccacccttcactctctctgtttcagaacatttttggtagaagtgctatccagaagtgaacttgtcaaaaggcaagtagcatgaaagaagacagaagaagcaaaaggctaatacagtggataatttctgagcacttgaagtttcttcaaatgtgcaagactgtgtgtcttcctattagatgtataaattggatatttcatgcctaattaaatgttgcgttggattgcagtgcctatcatacagtgattggagtaaattgaggcctaatcctgaacacatatagagcatattgttagatatttttcctgtgacatttgaagttattattctcccatttcctttttctttttttgtttataatcatatgtccctaagattgttttccttttttggaccaaaaaaaagaaaaaaaaaatcttagcttttcatcctcccagtgtattctgcattgtccttaccctagatcagccccttctgtgtaacagtttttctcacaatgtagcaacttttatccacccttcaggaccttcactgggactagttcattcattttcaaatagctatttcaacctttaacatctactgtcttagtcttttacacagaagccagagtgactggtcttggcaagactctgttgtgtatcaccactctaaccttactgatttgtttcagcaaatttgctttagttaaattgctttactcagattcccccaaactttatatgtgtattgtcatctttgtgcatattatttctcatgcatgaaatactcaatttttattcttttatctaacgcttactcttacatttctttaaagctctggccaagtattttatttcgtccctaaacattctaactatccaccaaactggtaagttggcttttctttttcctccccctgtcattcatttagctgttatatttcattttaatgttttgggtggtgcctcttatactatgttgtattcctagacaaggaaatgtatatcaaaatatgttagatgattgattgttttatctccttgatgatagcacctcttatactgctttacagaatcaggaaaaagtaaactgcattttacatagtggttttaaatattgattgattgatattctaaacctggtttcctatataaagttgtaagttcaagataaaaaaaaaaaaaaaaaaaca

SEQ ID NO: 592 - protein, 372 aa, Homo sapiens
MAKSKTKHRLCSQESSVSALLASCTLSGSNSSNSDGSFHYKDKLYRSASQALQAYIDDFDLGQIYPGASTGKINIDEDFTNMSQFCNYIYKPNNAFENLDHEKHSNFISCRRHIVNDIDSMSLTTDDLLRLPADGSFSYTYVGPSHRTSKKNKKCRGRLGSLDIEKNPHFQGPYTSMGKDNFVTPVIRSNINGKQCGDKIELLILKAKRNLEQCTEELPKSMKKDDSPCSLDKLEADRSWENIPVTFKSPVPVNSDDSPQQTSRAKSAKGVLEDFLNNDNQSCTLSGGKHHGPVEALKQMLFNLQAVQERFNQNKTTDPKEEIKQVSEDDFSKLQLKESMIPITRSLQKALHHLSRLRDLVDDTNGERSPKM

SEQ ID NO: 593 - DNA, 21 bp, artificial
  Description of artificial sequence: Oligonucleotide
aatggaaagcaatgtggtgac

SEQ ID NO: 594 - DNA, 21 bp, artificial
  Description of artificial sequence: Oligonucleotide
tccagagagagtacagctctg

SEQ ID NO: 595 - DNA, 2061 bp, Homo sapiens
atgaggcggacaggccccgaggaggaggcctgcggcgtgtggctggacgcggcggcgctgaagaggcggaaagtgcagacacatttaatcaaaccaggcaccaaaatgctaacactccttcctggagaaagaaaggctaatatttattttactcaaagaagagctccatctacaggcattcaccagagaagcattgcttccttcttcaccttgcagccaggaaagacaaatggcagtgaccagaagagtgtttcatctcatacagaaagtcagatcaacaaagagtccaagaaaaatgcgacccagctagaccatttgatcccaggcttagcacacgattgcatggcatcccctttagccacttcaaccactgcggacatccaggaagctggactctctcctcagtccctccagacttctggccaccacagaatgaaaaccccattttcaactgagctatctttgctccagcctgatactccagactgtgctggagatagtcataccccactggctttttccttcaccgaggacttggaaagttcttgtttgctagaccgaaaggaagaaaaaggggattctgccaggaaatgggaatggcttcatgagtctaagaagaactatcagagtatggagaaacacaccaaactacctggggacaaatgctgtcagcccttaggcaagactaaattggaaagaaaggtgtctgccaaagaaaacaggcaggcccctgtcctccttcaaacatacagggaatcctggaatggagaaaacatagaatcggtgaaacaaagccgtagtccagtttctgtgttttcctgggacaatgaaaagaatgacaaggactcctggagtcaacttttcactgaagattctcaaggccagcgggtcattgcccacaacactagagctccttttcaagatgtaaccaataactggaattgggacttagggccgtttcctaacagtccttgggctcagtgccaggaggatgggccaactcaaaatctgaagcctgatttgctctttacccaggactctgaaggtaatcaagttatcagacaccaattctaaatgtttgaagctttgtttctaaaagtaccttgaaatgatagagatgtaggaaaatatagttgtgggtggagagaggagtgagtttgtttaggtgggaaggtggcatgggatgaagttgtcattactgagcatcttctctgtgtaaataaagggcagtaccattgttaagacagtgggattggcatcatggctttccctcaggaaggtggtggctggtaaattccctgaatgagtctatgatgaacactgaggcagcacagtgggtatttatctctatgaaagtgccttttactcagcctgcacagagccatctctttgcccttccagatgtctgactgggaccttgcttatggatgtgtttttttttttttttttttgagatggagtctcgctctgtcgccaggctggagtgcagtggtgcgacctcagctcactgcaccctctgtgtcccggattcaagcgattctcctgcctcagcctcccgaatagcagggactacaggcatgcgccaccacgcccagctaattttttttggatttttagtagagacgaggtttcaccatattagccaggatggtctccatctcctgacctcctgatccgcccacctcagcctcccaaagtgctgagattacaggcataagccaccgcgcccagccagatgtgtgagcttttaatctctggctgatcttaacccacatcagcctaagcttgggatgattactcttgacccttttttttcagtgattagcaaatctccccacaacccaggtgtggagagaagagaggtagaatggtgctagtttcctattttatttttgtggtaactgtacagcactttaaagttatatactctatgtttaaatatctcccttaaaaagcctgagctgtacaacaatctggatgtgactctgttacccttttcccacaagataggagggaatcccctttgtaaaactatgaatccaaataaatgtttacaaagtg

SEQ ID NO: 596 - protein, 357 aa, Homo sapiens
MRRTGPEEEACGVWLDAAALKRRKVQTHLIKPGTKMLTLLPGERKANIYFTQRRAPSTGIHQRSIASFFTLQPGKTNGSDQKSVSSHTESQINKESKKNATQLDHLIPGLAHDCMASPLATSTTADIQEAGLSPQSLQTSGHHRMKTPFSTELSLLQPDTPDCAGDSHTPLAFSFTEDLESSCLLDRKEEKGDSARKWEWLHESKKNYQSMEKHTKLPGDKCCQPLGKTKLERKVSAKENRQAPVLLQTYRESWNGENIESVKQSRSPVSVFSWDNEKNDKDSWSQLFTEDSQGQRVIAHNTRAPFQDVTNNWNWDLGPFPNSPWAQCQEDGPTQNLKPDLLFTQDSEGNQVIRHQF

SEQ ID NO: 597 - DNA, 21 bp, artificial
  Description of artificial sequence: Oligonucleotide
caccttgcagccaggaaagac

SEQ ID NO: 598 - DNA, 21 bp, artificial
  Description of artificial sequence: Oligonucleotide
cagcacagtctggagtatcag

SEQ ID NO: 599 - DNA, 1907 bp, Homo sapiens
aatgcacacgagcagacagagaagcaacatctttaaggtactgagggcaggagaagttaatgtagaatactatgccagaaaaaataaattcccaaaagtggaagtgaaataaggacatttagagatgtacaaaagctgaccgaattcactaccagtcaacccacactacaagaaacatcaaatgagtcctccaagcagaaggaatccaataccagatgaaaatccagatctccacgaggaaatgaagaacaccagaaatgggtaactatactagatcggccctttcttcaaataagagcagttggaataacaaagctgttcagttgtacccttggaatccactgaaatcctgggtagggaagctccagtaccaccaactggaaagactgggaatgcctaatagctggtactggccattgtcgtaggctttgtccactctgacaaactgaagatggggactcgactcaccttcgccagccacaggaggacctccagacgaggacaggactcgctgcctttctttcccgtcagaaagggatcccttgcggacaggacctaagcaccacgcacctgccccccgggatgccgaacgaagtggtccctaaagctcctctgcaggcccaaccgaaacaggcctgaagctccaggatgggcgagaggatcctctttgagcgaaaccagccttctgcctggctggccctggtcaacaccctgggaagaggccgatttggcggacagaacggaagaaaagacctaaaggtagaatctcatgatgtcgagatgttaaaacactcaaattttaaggttcgactgtgagggggagatagggggtctcgagctggatcgacccctgagccttcatctgcagagtcctgtgcaccagctcagaggacaggactatgtgcaccaatggttctcatcaggcggcaacttcaccctcacatgcctcccccatccctgctggtacacaagaccacgactaggggaagcccggagggagaatgttaacccctggcatctatctagtcagcagaggtgagggatgctgctaaacaccttacaatccaccggaggacacccgcccccaccgaccccgaagtggccattccctggaggtggggaaactcgcctgtagatcaatgcccacgcacttggcggacaggaaatcacgaattggccactaactggatcttggatctgagaaaaaaattccagcgtcagagggaactctcggagatttgcccagagcataaggaacgtactccttccctcagtgatggatcctcacatctgggggaaatcatagacaatttcttttgtagggcgaactctgctatacagtttatgatgtcagagtgaatactttctttgagttgcagtcagaaactgtagatttttaaaaatttaaaattcattattctctgtcagtattccaaagtgtatacagaaagctattgcactgttcaggagatggcgcttaacattttggaaattcaaggtgatgaatgtccagataagactatctctcctggtacaaagtttgacaatgctgaacatttttaaaggttctttttgatatacaaagtgcaccaatgagtgctttttaattcttacaataattctgggtgaggtaggtatttttccaattcccattttatgcttcggtagccctttgtatttatacttcaaaacacttggctctcttgtaattatttaagaaattagttgtgattatttgtttaatgtgcaggagttacaaaaggcaagctttagaacaagacagacctggttatgattcctggctctgaaagctgtacaccctgtgaccctagacaggtgttttaatgcctcgctgcctctgtttcttgctctgtaaaatgtgaacaataacagtattggcctcatgc

SEQ ID NO: 600 - DNA, 21 bp, artificial
  Description of artificial sequence: Oligonucleotide
ttgcggacaggacctaagcac

SEQ ID NO: 601 - DNA, 21 bp, artificial
  Description of artificial sequence: Oligonucleotide
tagtcctgtcctctgagctgg

SEQ ID NO: 602 - DNA, 2553 bp, Homo sapiens
tgcgtgtcggggtccgctcgtgcgcgcctctccggggtctgtgcgcgtggccctccgctcgcgccggagggcgtgggcgtggcctcggcgtgggtgtggccgctcggggaggggcctcccgggggcggggccggcctggtccgcgcggtgacgcgccctgcagccccgagcgagcgagcgagcgagcgagttgccgagcgcgccccgtccctcgcgcgcgatgctcccctggacggcgctcggcctggccctgagcttgcggctggcgctggcgcggagcggcgcggagcgcggtccaccagcatcagccccccgaggggacctgatgttcctgctggacagctcagccagcgtctctcactacgagttctcccgggttcgggagtttgtggggcagctggtggctccactgcccctgggcaccggggccctgcgtgccagtctggtgcacgtgggcagtcggccatacaccgagttccccttcggccagcacagctcgggtgaggctgcccaggatgcggtgcgtgcttctgcccagcgcatgggtgacacccacactggcctggcgctggtctatgccaaggaacagctgtttgctgaagcatcaggtgcccggccaggggtgcccaaagtgctggtgtgggtgacagatggcggctccagcgaccctgtgggcccccccatgcaggagctcaaggacctgggcgtcaccgtgttcattgtcagcaccggccgaggcaacttcctggagctgtcagccgctgcctcagcccctgccgagaagcacctgcactttgtggacgtggatgacctgcacatcattgtccaagagctgaggggctccattctcgacgcgatgcggccgcagcagctccatgccacggagatcacgtccagcggcttccgcctggcctggccacccctgctgaccgcagactcgggctactatgtgctggagctggtgcccagcgcccagccgggggctgcaagacgccagcagctgccagggaacgccacggactggatctgggccggcctcgacccggacacggactacgacgtggcgctagtgcctgagtccaacgtgcgcctcctgaggccccagatcctgcgggtgcgcacgcggcccggtgaggcagggccgggggcttcgggcccggagtcgggggctgggccggcccccacgcagctcgccgccctccccgccccagaggaggccgggccagagcgcatcgtcatctcccacgcccggccgcgcagcctccgcgtgagttgggccccagcgctgggctcagccgcggcgctcggctaccacgtgcagttcgggccgctgcggggcggggaggcgcagcgggtggaggtgcccgcgggccgcaactgcaccacgctgcagggcctggcgccgggcaccgcctacctggtgaccgtgaccgccgccttccgctcgggccgcgagagcgcgctgtccgccaaggcctgcacgcccgacggcccgcgcccgcgcccacgccccgtgccccgcgccccgaccccggggaccgccagccgtgagccgtaagccggcgtccccgcccagccgagagggccggcgcctacctgagggcccctgtgtcccgaacccggagcggaggcgcccaacccggcagacgggtgcaggcccggcctttccccacgcggactccgcgcgaccccggccctctccctgcggccgcagggcttccccgcctggcgcctgccctccagggctggggcctcgcctggcgggaccccgcagcagccccggccccatccccgcccagagccgggcgtcgtgtgggtccgtgggtgataattgagagcgtcagacccaggactgttcagggaggagccccggtcagactcccacgtgtgaagaccgggccccaagtggcaagggctggcctggggcgggcagcttgggtcctggacgttgataggaagcggaaggggaatcgcgggaagctggcccaggtcaggtccgcaaaggcttctgaagaagaggaagggcgagtaggggcacctggacgctgatggtggccaggatgctcagctggccaggagggcagcacctgctggggacggtggccctgccttcatgcccaggacaccagctgggtccagctagcagccactgggaatcagaggaatggggcagagctgggcattcaggaccttgaggacacgtgaccccacccgcccaccgccactatcaggccccgggaccgcactgacaggaaaccttccgtcgtgagggagcacttcccaggggccgcagggacgacactctccagggaggccccagcaaccacaccatcttcttgctgtgagaggtctcaccccgggctacctcctgtcactactcactgccctggggtccgtgggcaagttgcccagggtgggggtgcctagccaggtgcagtccccgccccgcctagtcctcggcgtcacgcaatgctcacctcgcctcttccccactaacatcccagactttaaaattcagtaaatcagatgtacaccgaaaaaaaaaaaaaaaaa

SEQ ID NO: 603 - protein, 445 aa, Homo sapiens
MLPWTALGLALSLRLALARSGAERGPPASAPRGDLMFLLDSSASVSHYEFSRVREFVGQLVAPLPLGTGALRASLVHVGSRPYTEFPFGQHSSGEAAQDAVRASAQRMGDTHTGLALVYAKEQLFAEASGARPGVPKVLVWVTDGGSSDPVGPPMQELKDLGVTVFIVSTGRGNFLELSAAASAPAEKHLHFVDVDDLHIIVQELRGSILDAMRPQQLHATEITSSGFRLAWPPLLTADSGYYVLELVPSAQPGAARRQQLPGNATDWIWAGLDPDTDYDVALVPESNVRLLRPQILRVRTRPGEAGPGASGPESGAGPAPTQLAALPAPEEAGPERIVISHARPRSLRVSWAPALGSAAALGYHVQFGPLRGGEAQRVEVPAGRNCTTLQGLAPGTAYLVTVTAAFRSGRESALSAKACTPDGPRPRPRPVPRAPTPGTASREP

SEQ ID NO: 604 - DNA, 21 bp, artificial
  Description of artificial sequence: Oligonucleotide
aaccaacctgaggatttcacg

SEQ ID NO: 605 - DNA, 21 bp, artificial
  Description of artificial sequence: Oligonucleotide
agacagctgttcgtgagaagc

SEQ ID NO: 606 - DNA, 1999 bp, Homo sapiens
cactctgtaagttcaccgccggtcgggtccggccgccgcgctgtccagctcctgagaccttgctgtccgccggtctgccgtctgcgcgcctcacgctcctcagccctggaccggggacaagtaaccctcggtgacaagaccaaagtgcactgctgcccacacagttcctacctttctggcttcaattcttcagaagagtttgccgtcctttggggagaacgtgatttttgttatctcagcccactgacttcattgatctctaatcttttttaattccttgggccaactttgttcgtgcccccacactgtagccagaagcccgttggcgagctctggcacctgcaaaccaccccgtggaacgagtgtttcctctggctgagggttggagaggaggtgtggtctcagcaggcggcccgtagcctcacagccaggcctggtggtgaggtcaccatgtccaccaaggtgcccatctatctgaagcgtggcagtcgcaagggcaagaaggagaagcttcgggacctgctgtcctcggacatgatcagcccaccgctgggggacttccgccacaccattcatattggcagtggcggcggcagtgacatgtttggcgacatctccttcctgcagggcaagttccacctcctgccggggaccatggtggaggggcctgaagaagatggcaccttcgacctccccttccagttcacccgcaccgccaccgtgtgtgggcgggagctcccggacggcccatcccctctgctcaagaacgccatctccctcccggttatcggtggaccccaggctctcaccctgcccacagcccaggctccacccaagccccctcgcctgcacctggagacccctcagccttccccacaggagggagggagtgtggacatctggaggattccagagactggctcccccaacagtggactgaccccggagtcaggggccgaggagcccttcctgtccaatgccagctccctgctgtccctgcacgtggacctggggccttccatcctggatgatgtcctgcagatcatggatcaggacctggacagcatgcagatccccacataggacacgaggctgcctaggctggggtcccaggtggggcccagccaggaggtggggtgtggacccggccctggcggcggagtcagggtcccaagatcccacctgtatggtcgctggccagtgattctccttctgagccgtgtttcccctctccctccctctccacgtgggcagggcaggccccatcgctttcctctgataaccacatggacacatcctgaagtcagcccaggcgccctgagcatcttggggcacctggaccccatcacaatactccttcttccttcaggtccctgggtgaaggctttgctgaaaccgaccccccttttcacgtcccttctgcctctgccccgttggatgccctgactgggggcaggggaagagacagggcacagctggccacagggctcagccactgagcaggctgttccgggcctttggctttgcatcctggacggggagtgtcctgtcagggaccagatgtgtcctgcctcatccctagctccaatcccttccccacgtgaccggggattctggttgcaataaaacatgctgctgctggtggcggagctccctgtccctttgccccaggtttcctcccggaggcagacagtctcccagagctgagggcttgcctctggagaccccagccccagagggctttgtggaggacaggccttgccctcaagaacgtcgtacctgacgctgagcctgtcatgagaatgcaacaggagcaaaccaagtgttgctgtgacattgattcagatgtttggcaagaggtggctgagcactggggtgggcttggcactgtgccaagcctggggccaatccctgcccagtcagctggggtctggtgggggacacccaagaataaaagaataaccacaaagtgtgcaagggaaaaaaaaaaaaaaaaaaa

SEQ ID NO: 607 - protein, 210 aa, Homo sapiens
MSTKVPIYLKRGSRKGKKEKLRDLLSSDMISPPLGDFRHTIHIGSGGGSDMFGDISFLQGKFHLLPGTMVEGPEEDGTFDLPFQFTRTATVCGRELPDGPSPLLKNAISLPVIGGPQALTLPTAQAPPKPPRLHLETPQPSPQEGGSVDIWRIPETGSPNSGLTPESGAEEPFLSNASSLLSLHVDLGPSILDDVLQIMDQDLDSMQIPT

SEQ ID NO: 608 - DNA, 21 bp, artificial
  Description of artificial sequence: Oligonucleotide
aacgtcgtacctgacgctgag

SEQ ID NO: 609 - DNA, 21 bp, artificial
  Description of artificial sequence: Oligonucleotide
ccaagtgttgctgtgacattg

SEQ ID NO: 610 - DNA, 986 bp, Homo sapiens
attcaagatgatgttagagagatgacagagtctaggttagggagggcctgagtccttgtagactctgagtacggtgctgagcagggaagagacaggctctggcttagggtttagaaggaacacaggctactgcgatgaggattgtctgaaggggaacaaaggccaagatgttgtttgaagccgtgagactgagtgagatcatggaggaagtgaatgtaaatagaaaagggaagaagtctgaagacggagccctgagacactccattgtaaactggaagatgaggaagagccagcaaaggagactgagaaggggcagccagtgaagatggagccagggctagagtaagagccccttctgggatgctgtgacccccaagtttgaagactgctgataaccccaatctacgaagactagctatggaacttcctacactgagacaactccagtggaactctgataattatcctaaaataaggaggcttcttcagtagccctcgaaatatgttcaaatacatgattacatttatgtccttaatattgctattagtttctgatgttaatgtaaaagttggggaaaaagtggaaaagttaaagcagtgcaggttaattcaatgccagagtaacttctcagagggtgtatattcagtgtgaacaattttcaacagagaaatgtcaacttctggccacaacggcaaccagtaaaatgactatttttactgtcttatctattaatgaagaggagattgcataatatagatgaaggagcatagtatttgcaggtggaacgcctagcagggcttgagtctcaactctgctgcttttactctaattgaccgagacaagtcatttaaactaatagagcttcaattttctcatatctaatgtaacataacaattcacagccttttactttgtagttatcgtgaagatctaatcgcagtgaaatatatttatatatctgtctgccgataaaaaaaaaaaaaaa

SEQ ID NO: 611 - DNA, 21 bp, artificial
  Description of artificial sequence: Oligonucleotide
gactctgagtacggtgctgag

SEQ ID NO: 612 - DNA, 21 bp, artificial
  Description of artificial sequence: Oligonucleotide
tcttactctagccctggctcc

SEQ ID NO: 613 - DNA, 899 bp, Homo sapiens
cccgagcgccggccgggccatgacccccgctgctctgtcttgcaggctcgtcgccgcggccccccgagcccgaccgccgccgccaccaccaccagcgcccgggcgggcctcgcgcgcctcgggcgcggctccgcagtgagcccaccaagaaggaagcggcctgcagaggtgccgacatggggcttaagatgtcctgcctgaaaggctttcaaatgtgtgtcagcagcagcagcagcagccacgacgaggcccccgtcctgaacgacaagcacctggacgtgcccgacatcatcatcacgccccccacccccacgggcatgatgctgccgagggacttggggagcacagtctggctggatgagacagggtcgtgcccagatgatggagaaatcgacccagaagcctgaggaggtgtcctgggtttggctggctggctcctgctccagcggcccggcttcaggtgtccgggggcgtggctgcctggagcaggtgtgctgaataccctggatgggaactgagcgaacccgggcctccgctcagagagacgtggcaggaccagcgaggaatccagcctgtccacttccagaacagtgtttcccaggccccgctgagtggaccggacctctgacacctccaggttcttgctgactccggcctggtgaaagggagcgccatggtcctggctgttggggtcccagggagaggctctcttctggacaaacacaccctcccagcccccagggctgtgcaaacacatgcccctgccataagcaccaacaagaacttcttgcaggtggagtggctgttttttataagttgttttacagatacggaaacagtccaaaatgggatttataatttcttttttgcattataaataaagatcctctgtaacaaaa

SEQ ID NO: 614 - protein, 76 aa, Homo sapiens
MGLKMSCLKGFQMCVSSSSSSHDEAPVLNDKHLDVPDIIITPPTPTGMMLPRDLGSTVWLDETGSCPDDGEIDPEA

SEQ ID NO: 615 - DNA, 21 bp, artificial
  Description of artificial sequence: Oligonucleotide
tgtcctgcctgaaaggctttc

SEQ ID NO: 616 - DNA, 21 bp, artificial
  Description of artificial sequence: Oligonucleotide
catccagggtattcagcacac

SEQ ID NO: 617 - DNA, 432 bp, Homo sapiens
ttatgtgcctgaagtcgcacagtgaataagctaaaacacctgcttttaacaatggtaccatacaaccactactccattaactccacccacctcctgcacccctccccacacacacaaaatgaaccacgttctttgtatgggcccaatgagctgtcaagctgccctgtgttcatttcatttggaattgccccctctggttcctctgtatactactgcttcatctctaaagacagctcatcctcctccttcacccctgaatttccagagcacttcatctgctccttcatcacaagtccagttttctgccactagtctgaatttcatgagaagatgccgatttggttcctgtgggtcctcagcactattcagtacagtgcttgactcacagcaggcactcagaaaatactggaggaaataaaacaccaaagatat

SEQ ID NO: 618 - DNA, 21 bp, artificial
  Description of artificial sequence: Oligonucleotide
ctgctccttcatcacaagtcc

SEQ ID NO: 619 - DNA, 24 bp, artificial
  Description of artificial sequence: Oligonucleotide
gagatctcgagatctcgatcgtac

SEQ ID NO: 620 - DNA, 2575 bp, Homo sapiens
gagaacggggtagcccggcgcttacacatgtcacatgtgctttttaagacggccgggagcgcctgcgagctggatctggtggaggatgctgcggcaggtgcttcgcagagggctccagtcgttctgccacaggctgggtttgtgcgtgagccggcacccggtctttttcctcaccgtgcccgcagtcctgacaatcaccttcggcctcagcgcgctcaaccgcttccagcccgagggcgacctggagcgcctggtcgctcccagccacagcctggccaagatcgagcgcagcctggccagcagccttttccccctggaccagtccaaaagccagctctattcggacttacacacccctgggaggtatggcagggtgatcctcctctccccaaccggggacaatattttgctccaggctgaggggatcctgcagacccaccgagccgtgctggaaatgaaggatgggaggaacagttttattggacaccaactgggcggggtagtggaagtgccaaacagcaaagatcagcgggtcaagtcagccagagccattcaaatcacctactacctccagacctatggctctgccacccaagacctcataggggagaagtgggagaatgagttctgtaagcttataaggaagctccaggaggagcatcaagaactccagctctactctttagcatcctttagcctctggagggactttcataagaccagcatcctggccagaagcaaggtcctggtgagcctcgtgctgatcctgaccacagccaccctctccagctccatgaaggactgcttgcgcagtaagcccttcctgggcctcctgggggtgctcacagtatgcatctccatcatcacagcagcagggatcttcttcatcaccgatggaaagtacaactccaccctgctgggaatcccgttcttcgccatgggtcatggaactaaaggagtgtttgagcttctgtccggatggcggagaaccaaagagaacttgcccttcaaagacaggatagcagatgcctattctgatgtgatggtcacctataccatgaccagctccctgtacttcatcacttttggcatgggtgccagcccattcacaaacatagaggctgtgaaggtcttctgtcaaaacatgtgtgtctctattctgttgaactacttctacattttctccttctttggctcctgtctggtctttgctggccaactagagcaaaaccgctaccacagcatcttttgctgtaagatcccttctgcagaatacctggatcgcaaacctgtgtggttccagacagtgatgagtgatgggcatcaacagacgtcccatcatgagacgaacccctaccagcaccacttcattcagcacttcctccgtgaacattataatgaatggattaccaatatatatgtgaagccatttgttgtcatcctctatctcatttatgcctccttctccttcatggggtgcttacagatcagtgacggagccaacatcatcaatctactagccagtgattcgccaagtgtttcctatgccatggttcagcagaaatatttcagcaactatagccctgtgataggattctacgtctatgagcccctagagtactggaacagcagcgtccaggatgacctaagaagactctgtagtggattcactgcagtgtcctgggtggagcagtactaccagttcctgaaagtcagcaacgtcagtgccaataacaaaagtgacttcatcagtgtcctgcaaagctcatttttaaaaaagccagaattccagcattttcgaaatgatatcatcttctccaaggcaggggatgaaagcaatatcattgcttctcgcttgtatctggtggccaggactagcagagacaagcagaaagaaatcacagaagtgttggaaaagctgaggcccctatccctctcaaagagcatccgattcatcgtgttcaacccctcctttgtcttcatggaccattacagcttgtctgtcacagtgcctgttctgattgcaggctttggtgttctcctggtgttaatcctgacttttttcctagtgatccaccctctgggaaacttctggctaattcttagcgtcacctcaattgagctgggcgttctgggcttaatgacattatggaacgtcgacatggattgcatttctatcttgtgccttatctacaccttgaatttcgccattgaccactgtgcaccactgcttttcacatttgtattagcaactgagcacacccgaacacaatgtataaaaagctccttgcaagaccatgggacagccattttgcaaaatgttacttcttttcttattgggttagtcccccttctatttgtgccttcgaacctgaccttcacactgttcaaatgcttgctgctcactgggggttgcacacttctgcactgttttgttattttacctgtgttcctaacgtttttccccccttccaaaaagcaccacaagaaaaagaaacgtgccaagcgaaaggagagagaggaaattgaatgcatagaaattcaagagaacccggatcacgtcaccacagtatga

SEQ ID NO: 621 - protein, 829 aa, Homo sapiens
MLRQVLRRGLQSFCHRLGLCVSRHPVFFLTVPAVLTITFGLSALNRFQPEGDLERLVAPSHSLAKIERSLASSLFPLDQSKSQLYSDLHTPGRYGRVILLSPTGDNILLQAEGILQTHRAVLEMKDGRNSFIGHQLGGVVEVPNSKDQRVKSARAIQITYYLQTYGSATQDLIGEKWENEFCKLIRKLQEEHQELQLYSLASFSLWRDFHKTSILARSKVLVSLVLILTTATLSSSMKDCLRSKPFLGLLGVLTVCISIITAAGIFFITDGKYNSTLLGIPFFAMGHGTKGVFELLSGWRRTKENLPFKDRIADAYSDVMVTYTMTSSLYFITFGMGASPFTNIEAVKVFCQNMCVSILLNYFYIFSFFGSCLVFAGQLEQNRYHSIFCCKIPSAEYLDRKPVWFQTVMSDGHQQTSHHETNPYQHHFIQHFLREHYNEWITNIYVKPFVVILYLIYASFSFMGCLQISDGANIINLLASDSPSVSYAMVQQKYFSNYSPVIGFYVYEPLEYWNSSVQDDLRRLCSGFTAVSWVEQYYQFLKVSNVSANNKSDFISVLQSSFLKKPEFQHFRNDIIFSKAGDESNIIASRLYLVARTSRDKQKEITEVLEKLRPLSLSKSIRFIVFNPSFVFMDHYSLSVTVPVLIAGFGVLLVLILTFFLVIHPLGNFWLILSVTSIELGVLGLMTLWNVDMDCISILCLIYTLNFAIDHCAPLLFTFVLATEHTRTQCIKSSLQDHGTAILQNVTSFLIGLVPLLFVPSNLTFTLFKCLLLTGGCTLLHCFVILPVFLTFFPPSKKHHKKKKRAKRKEREEIECIEIQENPDHVTTV

SEQ ID NO: 622 - DNA, 21 bp, artificial
  Description of artificial sequence: Oligonucleotide
cagctctactctttagcatcc

SEQ ID NO: 623 - DNA, 21 bp, artificial
  Description of artificial sequence: Oligonucleotide
cctttagttccatgacccatg

SEQ ID NO: 624 - DNA, 6035 bp, Homo sapiens
ggcggcggcggcggcggccccgggcgctgagcgggtgcccggcgcggagagcggcgagcgcagccatgccccaggccgcctccggggcagcagcagcggcggccggggccgaggcgcgggccgggggcgccggggggccggcggcggcccgggcgggacgatgaagcggcagaacgtgcgcacgctggcgctcatcgtgtgcaccttcacctacctgctggtgggcgccgcggtcttcgacgcgctggagtcggagcccgagctgatcgagcggcagcggctggagctgcggcagcaggagctgcgggcgcgctacaacctcagccagggcggctacgaggagctggagcgcgtcgtgctgcgcctcaagccgcacaaggccggcgtgcagtggcgcttcgccggctccttctacttcgccatcaccgtcatcaccaccatcggctacgggcacgcggcgcccagcacggatggcggcaaggtgttctgcatgttctacgcgctgctgggcatcccgctcacgctcgtcatgttccagagcctgggcgagcgcatcaacaccttggtgaggtacctgctgcaccgcgccaagaaggggctgggcatctcgtggccttcgcttcgtctcatccttacgggcctcacggtcatcggcgccttcctcaacctcgtggtgctgcgcttcatgaccatgaacgccgaggacgagaagcgcgacgccgagcaccgcgcgctgctcacgcgcaacgggcaggcgggcggcggcggagggagtggcagcgcgcacactacggacaccgcctcatccacggcggcagcgggcggcggcggcttccgcaacgtctacgcggaggtgctgcacttccagtccatgtgctcgtgcctgtggtacaagagccgcgagaagctgcagtactccatccccatgatcatcccgcgggacctctccacgtccgacacgtgcgtggagcagagccactcgtcgccgggagggggcggccgctacagcgacacgccctcgcgacgctgcctgtgcagcggggcgccacgctccgccatcagctcggtgtccacgggtctgcacagcctgtccaccttccgcggactcatgaagcgcaggagctccgtgtgactgccccgaggggcctggagcacctgggggcgcgggcgggggacccctgctgggaggccaggagactgcccctgctgccttctgcccagtgggaccccgcacaacatccctcaccactctcccccagcacccccatctccgactgtgcctgcttgcaccagccggcaggaggccgggctctgaggacccctggggcccccatcggagccctgcaaattccgagaaatgtgaaacttggtggggtcagggaggaaaggcagaagctgggagcctcccttccctttgaaaatctaagaagctcccagtcctcagagaccctgctggtacccagacccccaccttcggaggggacttcatgttccgtgtacgtttgcatctctatttatacctctgtcctgctaggtctcccaccttcccttggttccaaaagccagggtgtctttgtccaagtcacccctactcagccccactccctttcctcatccccagctgtgtctcccaacctcccttcgtgttgttttgcatggctttgcagttatggagaaagtggaaacccagcagtccctaaagctggtccccagaaagcaggacagaaagaaggagggacaggcaggcagcaggaggggcgagctgggaggcaggaggcagcggcctgtcagtctgcagaatggtcgcactggaggttcaagctaactggcctccagccacattctcatagcaggtaggacttcagccttccagacactgcccttagaatctggaacagaagacttcagactcaccataattgctgataattacctactcttaaatttgtcgagtgatttttagcctctgaaaactctatgctggccactgattcctttgagtctcacaaaaccctacttaggtcatcagggcaggagttctcactcccattttacagatgagaatactgaggcctggacaggtgaagtgaccagagagcaaaaggcaaaggggtgggggctgggtgcagtggctcacacctgtattcccaacacttttggaggctgaggttagaggattgcttgagcccaggaattcgagaccagcctaggcgacatagtgagaccccatctctacaaaaaataaaaaatttaccaggtgtggtggcacgtgcctgggagtcccagcgacttgggaggctgaggtgggaggattgtttgagcctgggaggtcaaggctgtagtgagccctgattacaccactgtactccagcctgggtgacagggcaagaccctgtctcaaaaaaaaaaaaaaaatggcaaagggagacaagagcccagcctacttgttcctagccaaagtgttctttccttccagcttggcctgctcttaaaagcaaagctcctgcagtgtacatcctggcattgtgtggctacctgggttttaaaccagaatcagaagtcccgggtcagagggcactgctgaggctcagcctcttctcttcttggccaggaggcagcagctctgaatgggcccctgaggctgcacaggggcctttgtcactggggtgcatgcttacaaacagtgcagttcttggcaccgaggtaagcagggctgggtctcatggcagaaaggccaggatctggggctctaggaatttgggaattgggcagagtggccaagaaagctggcaggcatatcctatgggacatcacacctggcaccattgtcattgttggtgcctgtgtcccaagtagctagtgataagctgaggctgcagcaagaaacacccttcccaggtgggggagtttggaccagaggtgccctctgcccaccacacctgcaacccagaagcccagatggaacgcagctgatgaaggtgatgcttgaggctcacttttggggccccacagctggagccggtatagtgactgggacaacatcaaggggtggatgaggggcctctcctcccgcaacactgccttcccatgctgttcccctgccagctccttaacactgccgaccaaggccagacctggcattcaggaaagttggagggcagcacccatagggtggccagcctcaggccccaccccagctgtgtcctctagtctctggggacccctggggggaagaagtctaccctgcttgtgagtcccgtctcagtgtggaggaactggctgcacgtgggacctgaaggtgccctctgtgtttatgttgggggggggggggcagtgctggctgcctctgtcctgtgtgtgaccctgccctcgaagggtcctgtcctgtcagtcccgagggagccacaaccaaagctgcggagagaaggtggggaacggtgcggagtggccgtggggcacagcgtggcagactgttcagtctctgctgggtctttcctagggacctggaaggccagtgttgcttccccctcactccctttcactgcaggcagcctctctccttccccaatgccttatgcctgggcacactgccacagaatatgcaatatgtgtgggtgacgatgccctcacgaccacacccccaccccgggcagcccccggactccaaaggtcgtggctgccacagcctccctcagctcttcctgcctatctgtcttcacactgagaatggcgcccaataaatgctatccacggagaccaggctcaggctccagctgcctctgtcatcgtatgcccttgctgctgccagggaggggccatctcccaccccctcccctgccggggtctacaaacatacctagctgctgggtgccgtggctcacacctataatcacagcactaggcgggcagatcacctgaggtcagaagttcaagaccagcctggccaacatggtaaaaccccgtctctactaaaaatacaaaaattagctgagcgtggtggcgcctgtctgtagtcccagctactcggctactcaggaggctgacgcacgagaatcgcttgaacccgggaggcggaggttgcagtgagctgagatcgcgccactgcactccagcctgagcgatagagtgagaccctgtctaaaaaaaacaataataataaaataaaataacatacctagctgactcgccatgggctcgctggcctgtgggcgacactggcttcccttttgggatttcccagaagatccagattttcttaagtccccttggaacagactaagaaagaaacaccttagaaatcacctggtcctattgtccccccgtacatgagtaactgaggcccacagagagcaaatcgcctgcctgagtcacacagcagtgagtggcagacctaggctaggaactagaactggggattgctattccagtgctccccatcctcacacagcctgtggagtccgcctggacacaccccagctgacagtggtacctcccagtcagccaggagaatggattccttctcctgcagtaggggccccctggctgagtggcctgattgactaaaacatatgtctttgaaggagagtgcatcacaagcacctttctttggggtagatttttctctgggtctagagggacacctcaggcttgggactgggcctcagaacctaggacagaccctgagagcagacccaccttatccatctggtgccagctccccaggtcagctacagcaacccccgaacttcatagagtacaatccacagtaatagcacacagctctgtacctatctagctccatgcctatctatctgcctacctttcacaaaataattcttagcaaccctgctacagccaatgattctaatacgttctgttctattacatgttataaaatgctggtcacgatccactaaattgatgtctctacctgctaatggtttaatacctgcagattgaaatatactggagaaataaagagagtaggagtagggacactttctcccagtgcccacaccgcccctcgttacccgcataggtcaactgaaagatacagagagggaagctttgatggggggttcagagttcaaaggaagaaatgatggcacctgcactccctgcccccagaggcaggacacagccagccctcctgtgacagcactcctggcagctccttgttggcctgcagcccttagttgccattgactcacccactcctaaggccaccacatcaaaatctgaggcttactgccctggcccacctgcctctgtctttcttaaaacagctaaatgcaacgatagcagaaattagcttgtttttgaggttggcaatgaccagttcaactcttattttcttaagcagtgcttgcaggacataaatgtgatgacacttgccctcctttctttatcgcctggggcagactttacaaacagacctgggaggagtcccctaaggggctgcatttatccccatctccctaggggtgatcagcattgtgacagctgggcagagcagtggtgaactgcacccatgtccctgctcacatctcctaagatctcagaattgcctgaggttctagcgtgggctccttctctccagatgatgccatccccacccccctcatttccacacagcatctgaggcatcctgcactaaaagatatatgtacagcaaaacaaaaatagaaaaccagcacagcagagtggaggtggggtataaatatacccagatccccgctgatttggttactcggggtgagcatcagatggaaatagaagtttccgggggccaagagagaaagagggatgtaacgacaattcttttcaaaacgtgtcccatggtatgcctcgtggaaaaaatggttcgttggtcaaatgaatttgggaaaatgctgtcaatatcaccgactcatggagcttcgcaaggcatcttagcttaataaaggttatgaaaagtcttgcagcaaagatgctgtttaccccacttaatccagcactgcccaaactcattccaaataccagagcctctgtttgca

SEQ ID NO: 625 - protein, 323 aa, Homo sapiens
MKRQNVRTLALIVCTFTYLLVGAAVFDALESEPELIERQRLELRQQELRARYNLSQGGYEELERVVLRLKPHKAGVQWRFAGSFYFAITVITTIGYGHAAPSTDGGKVFCMFYALLGIPLTLVMFQSLGERINTLVRYLLHRAKKGLGISWPSLRLILTGLTVIGAFLNLVVLRFMTMNAEDEKRDAEHRALLTRNGQAGGGGGSGSAHTTDTASSTAAAGGGGFRNVYAEVLHFQSMCSCLWYKSREKLQYSIPMIIPRDLSTSDTCVEQSHSSPGGGGRYSDTPSRRCLCSGAPRSAISSVSTGLHSLSTFRGLMKRRSSV

SEQ ID NO: 626 - DNA, 21 bp, artificial
  Description of artificial sequence: Oligonucleotide
agactttacaaacagacctgg

SEQ ID NO: 627 - DNA, 23 bp, artificial
  Description of artificial sequence: Oligonucleotide
gcttgcaggacataaatgtgatg

SEQ ID NO: 628 - DNA, 21 bp, artificial
  Description of artificial sequence: Oligonucleotide
tgacactggcaaaacaatgca

SEQ ID NO: 629 - DNA, 21 bp, artificial
  Description of artificial sequence: Oligonucleotide
ggtccttttcaccagcaagct

SEQ ID NO: 630 - DNA, 21 bp, artificial
  Description of artificial sequence: siRNA
ccacagaagguaccaguuauu

SEQ ID NO: 631 - DNA, 21 bp, artificial
  Description of artificial sequence: siRNA
uaacugguaccuucugugguu

SEQ ID NO: 632 - DNA, 21 bp, artificial
  Description of artificial sequence: siRNA
cagcaagacucccucuaaauu

SEQ ID NO: 633 - DNA, 21 bp, artificial
  Description of artificial sequence: siRNA
uuuagagggagucuugcuguu

SEQ ID NO: 634 - DNA, 1791 bp, Homo sapiens
atgatgaccatgactacgatggctgacggcttggaaggccaggactcgtccaaatccgccttcatggagttcgggcagcagcagcagcagcagcactccccggccatggcaggcgcgcactaccctctgcactgcctgcactcggcggcggcggcggcagcggccggctcgcaccaccaccaccaccaccagcaccaccaccacggctcgccctacgcgtcgggcggagggaactcctacaaccaccgctcgctcgccgcctacccctacatgagccactcgcagcacagcccttacctccagtcctaccacaacagcagcgcagccgcccagacgcgaggggacgacacagatcaacaaaaaactacagtgattgaaaacggggaaatcaggttcaatggaaaagggaaaaagattcggaagcctcggaccatttattccagcctgcagctccaggctttaaaccatcgctttcagcagacacagtatctggcccttccagagagagccgaactggcagcttccttaggactgacacaaacacaggtgaagatatggtttcagaacaaacgctctaagtttaagaaactgctgaagcagggcagtaatcctcatgagagcgaccccctccagggctcggcggccctgtcgccacgctcgccagcgctgcctccagtctgggacgtttctgcctcggccaagggtgtcagtatgccccccaacagctacatgcctggctattctcactggtactcctctccacaccaggacacgatgcagagaccacagatgatgtgagttgcccaagggaacaccctagggaaacgtctgaacaaggaaaagaggatccgggacctgcttgtatctgcgaaaaggagccaaaggagcaggcttaggagagctcataagtgtggcaagaagccgactaggctcattctctctccctctctctctctctccctctcctttctttttacttcttcctttcctccattccttctttctttccttttcctttctacctttcttttctttttgcctttcaccttttttctcatttaccttctctcttgagcaacgtcagtaattgatcttgcatctcagagagagagaaagagcatgtgtgagagagaaactggtttctatgccagcactcctgaaaccccttactgtaaggatattttctcttaccccttgggatccaggctctgagtctcttctctttgggagtatccatcaaaatgactttttttaaaaacagattttcccccaaccagaagaatctgcacaaacttggcagcgtttttacttgtttaatgagtttaagacattacatggtgaaagagaagcattttggactcctgcatttttatttaccattcccagactgacgagaaaaagaaaattcctcacataacagcccttctctaaagaaaaaggaaaaagtggctgtaagattagaacattgctacaaagggaatgctgcatgttttatcaaaatgcaatgaccaggaatgatggttgattaaaaaaaaacaaaacaaaaaccactctttccccaccccacccccccaaaccctgaactggaatcaggaaagacggaggaaacaatcaaaatcaccattctattgctttgacacctttactaggtgaattggtggcattcacaaagctaatagggacgtttatatcaagaaacatttctgtatatattgttgaattttagttgtacatatactttgtatgtttttgtcttctttcatatatggagtaaaagccacaaaacgctga

SEQ ID NO: 635 - protein, 265 aa, Homo sapiens
MMTMTTMADGLEGQDSSKSAFMEFGQQQQQQHSPAMAGAHYPLHCLHSAAAAAAAGSHHHHHHQHHHHGSPYASGGGNSYNHRSLAAYPYMSHSQHSPYLQSYHNSSAAAQTRGDDTDQQKTTVIENGEIRFNGKGKKIRKPRTIYSSLQLQALNHRFQQTQYLALPERAELAASLGLTQTQVKIWFQNKRSKFKKLLKQGSNPHESDPLQGSAALSPRSPALPPVWDVSASAKGVSMPPNSYMPGYSHWYSSPHQDTMQRPQMM

SEQ ID NO: 636 - DNA, 21 bp, artificial
  Description of artificial sequence: Oligonucleotide
gctgtaagattagaacattgc

SEQ ID NO: 637 - DNA, 22 bp, artificial
  Description of artificial sequence: Oligonucleotide
caattcacctagtaaaggtgtc

SEQ ID NO: 638 - DNA, 1600 bp, Homo sapiens
gaattccgggctgtagagccttgcgcgcgcagtggggatggaacgttgctaggcttagcgggtctggctgctgggggcccgagcagcacgctcggagccgccgcgcgccaaagcgggaatctgggaggcgagcagctctgcagttaatgcacgtattttaaactcccgggcctgcggacgctatgcacaggaagcacctccaggagattccagacctgagtagcaacgttgccaccagcttcacgtggggatgggattccagcaagacttctgaactgctgtcaggcatgggggtctccgccctggagaaagaggagcccgacagtgagaacatcccccaggaactgctctcaaacctgggccacccggagagccccccacggaaacggctgaagagcaaagggagtgacaaagactttgtgattgtccgcaggcctaagctaaatcgagagaactttccaggtgtttcatgggactcccttccggatgagctgctcttgggaatcttttcctgtctgtgcctccctgagctgctaaaggtctctggtgtttgtaagaggtggtatcgcctagcgtctgatgagtctctatggcagaccttagacctcacaggtaaaaatctgcacccggatgtgactggtcggttgctgtctcaaggggtgattgccttccgctgcccacgatcatttatggaccaaccattggctgaacatttcagcccttttcgtgtacagcacatggacctatcgaactcagttatagaagtgtccaccctccacggcatactgtctcagtgttccaagttgcagaatctaagcctggaaggcctgcggctttcggatcccattgtcaatactctcgcaaaaaactcaaatttagtgcgacttaacctttctgggtgttctggattctctgaatttgccctgcagactttgctaagcagctgttccagactggatgagctgaacctctcctggtgttttgatttcactgaaaagcatgtacaggtggctgttgcgcatgtgtcagagaccatcacccagctgaatcttagcggctacagaaagaatctccagaaatcagatctctctactttagttagaagatgccccaatcttgtccatctagacttaagtgatagtgtcatgctaaagaatgactgctttcaggaatttttccagctcaactacctccaacacctatcactcagtcggtgctatgatataatacctgaaactttacttgaacttggagaaattcccacactaaaaacactacaagtttttggaatcgtgccagatggtacccttcaactgttaaaggaagcccttcctcatctacagattaattgctcccatttcaccaccattgccaggccaactattggcaacaaaaagaaccaggagatatggggcatcaaatgccgactgacactgcaaaagcccagttgtctatgaagtatttattgcaggatggtgtctcttctttagaacagggaaaataggcaggaagcccaattgctggagtacttagctagttttattcttggttttccctttgccttcattctgcaagtatactagggagccatttgagaggg

SEQ ID NO: 639 - protein, 424 aa, Homo sapiens
MHRKHLQEIPDLSSNVATSFTWGWDSSKTSELLSGMGVSALEKEEPDSENIPQELLSNLGHPESPPRKRLKSKGSDKDFVIVRRPKLNRENFPGVSWDSLPDELLLGIFSCLCLPELLKVSGVCKRWYRLASDESLWQTLDLTGKNLHPDVTGRLLSQGVIAFRCPRSFMDQPLAEHFSPFRVQHMDLSNSVIEVSTLHGILSQCSKLQNLSLEGLRLSDPIVNTLAKNSNLVRLNLSGCSGFSEFALQTLLSSCSRLDELNLSWCFDFTEKHVQVAVAHVSETITQLNLSGYRKNLQKSDLSTLVRRCPNLVHLDLSDSVMLKNDCFQEFFQLNYLQHLSLSRCYDIIPETLLELGEIPTLKTLQVFGIVPDGTLQLLKEALPHLQINCSHFTTIARPTIGNKKNQEIWGIKCRLTLQKPSCL

SEQ ID NO: 640 - DNA, 22 bp, artificial
  Description of artificial sequence: Oligonucleotide
gaatctccagaaatcagatctc

SEQ ID NO: 641 - DNA, 22 bp, artificial
  Description of artificial sequence: Oligonucleotide
gggagcaattaatctgtagatg

SEQ ID NO: 642 - DNA, 3520 bp, Homo sapiens
attcgctccctcccaccccactgctcccgctccattgtctgggaattgcagccgcggggcgggcggcggcggcggcggcggcggccgggacccagcgggccaggtggggacggcgcggagcgggtgcgggagatgccgtgcgggactggggccacctgagccgcccgcctcgtccccgccttctgtgggaaggatgtgcgcgcggatggccggtcgcacaacagcggcccctcgggggccctacggcccctggctctgcctcctggtggccctcgccctggacgtcgtgagagtggactgtggccaggctcccctggaccctgtctacctgccggcagccctggagctcctagacgcccctgaacacttccgtgtgcagcaggtgggccactacccacctgccaactcctctctgagctcccgatctgagacctttctgctcctacagccctggcccagggcccagccacttctccgggcctcctacccaccttttgccactcagcaggtggtcccccctcgagtcactgagccccaccaacggccagtcccatgggacgtgcgggccgtttcagtggaagcggctgtgactccagcagagccctacgcccgggttctcttccacctcaaagggcaggattggccaccagggtctggcagcctgccctgtgcccggctccatgccacacaccctgccggcactgctcaccaagcctgccgcttccagccatccctgggcgcctgcgtggtggagctggagcttccctcgcactggttctcacaggcctccaccacacgggccgagctggcctacacgcttgagcctgcagctgagggccctgggggctgtggctccggcgaggagaacgaccctggggagcaggccctcccagtggggggtgtggagctgcgcccagcagaccccccgcagtaccaggaggtacctctggacgaggctgtgactctgcgggtgcctgacatgccagtgcggcccggccagctctttagtgctaccctcctgcttcggcacaacttcacagccagcctcctgaccctgcggatcaaggtgaagaaggggctgcatgtgacagccgcccgcccagcccagcccacactctggactgccaagctggaccgcttcaagggctccaggcaccacaccaccctcatcacctgccaccgtgctgggctcacagagccagattccagcagtccccttgaactgtctgagttcctatgggtggactttgtggtggagaatagcactggtgggggcgtagcggtcactcgccccgtcacgtggcagctggagtacccaggccaggcccctgaagcagagaaggacaaaatggtgtgggaaatcctggtgtctgagcgggacatcagagcccttatcccactggccaaggctgaggagctggtgaatacagcaccactgactggagtgccccagcatgtccccgtgcgccttgtcactgtggacggcgggggggccttggtggaggtgacagagcatgtcggctgcgagtctgccaacacacaggtcctgcaggtgtctgaggcctgtgatgccgtgttcgtggctggcaaggagagccggggcgcccggggggtgcgagtggacttctggtggcgccggctccgcgcctcgctgcggctgaccgtgtgggcccccctgctaccgctgcgtatcgagctcaccgacaccaccctcgagcaggtccgcggctggagggtacctggccctgctgaagggcctgcggaacccgctgcagaggcgtcggatgaggccgagcggcgcgcccgtggctgccacctgcagtaccagcgggccggtgtgcgcttcctcgcccccttcgcggcccacccgctggacggcggccgccgcctcacgcacctgcttggccccgactggctgctagacgtgtcccacctcgtggcgccacacgcccgcgtgctggactcgcgtgtagcctctctggagggtggccgtgtcgtggtgggccgggagcccggtgtcacctccattgaggtgcgttccccactgtctgactccatcctgggggagcaggcgctggctgtgacggacgacaaggtctcagtgctggagctgagggtgcagccagtgatgggcatctcgctgaccttgagccggggcactgcccaccccggggaggtcacagctacgtgctgggcacagtcagcccttcccgccccaaagcaggaggtggccctctccctatggctgtccttctctgatcacactgtggccccagctgagctctacgaccgccgtgacctgggactgtccgtctcagccgaggagcctggtgccatcctgccagctgaggagcagggtgcccagctcggggtggtggtgagtggggcaggcgccgaggggctgccgctgcatgtggctctgcacccgcccgagccctgccgccggggccgccaccgtgtgcctctggcctctggcaccgcctggctggggctgccccctgcctccactccagcccctgctctcccatccagccctgcttggagcccaccagccacagaagccaccatgggtggtaaacggcaggtggcaggcagtgtcgggggcaacacaggtgtgaggggcaagtttgagcgggcagaggaggaggccaggaaggaggagaccgaagccagggaggaggaggaggaagaggaggaggagatggtccctgcccctcagcatgtcactgagctagagctgggcatgtacgccctgctgggagtcttctgcgtggccatcttcatcttcttggtcaatggtgtggtcttcgtcctgcgctatcagcgcaaagaacctcccgacagtgccactgaccccacctccccccagccccacaactgggtctggctgggcactgaccaggaggaactgagccgccagctggaccggcagtcccctggcccgcccaagggggaggggagctgcccctgtgagagtgggggaggaggggaggcccctaccctggcccctggccctcctgggggcaccaccagctcctcaagcaccctggcccgaaaggaggctggggggcggcggaagcgagtagagtttgtgacatttgcgccagcccctccagcccagtcacctgaggagcctgtaggggcccctgctgtgcagtccatccttgtggcaggcgaggaggacatccgctgggtgtgtgaggacatggggctgaaggaccctgaggagcttcgcaactacatggagaggatccggggcagctcctgaccctccacagccacctggtcagccaccagctggggcaacgagggtggaggtcccactgagcctctcgcctgcccccgccactcgtctggtgcttgttgatccaagtcccctgcctggtcccccacaaggactcccatccaggccccctctgccctgccccttgtcatggaccatggtcgtgaggaagggctcatgccccttatttatgggaaccatttcattctaacagaataaaccgagaaggaaaccaga

SEQ ID NO: 643 - protein, 1024 aa, Homo sapiens
MCARMAGRTTAAPRGPYGPWLCLLVALALDVVRVDCGQAPLDPVYLPAALELLDAPEHFRVQQVGHYPPANSSLSSRSETFLLLQPWPRAQPLLRASYPPFATQQVVPPRVTEPHQRPVPWDVRAVSVEAAVTPAEPYARVLFHLKGQDWPPGSGSLPCARLHATHPAGTAHQACRFQPSLGACVVELELPSHWFSQASTTRAELAYTLEPAAEGPGGCGSGEENDPGEQALPVGGVELRPADPPQYQEVPLDEAVTLRVPDMPVRPGQLFSATLLLRHNFTASLLTLRIKVKKGLHVTAARPAQPTLWTAKLDRFKGSRHHTTLITCHRAGLTEPDSSSPLELSEFLWVDFVVENSTGGGVAVTRPVTWQLEYPGQAPEAEKDKMVWEILVSERDIRALIPLAKAEELVNTAPLTGVPQHVPVRLVTVDGGGALVEVTEHVGCESANTQVLQVSEACDAVFVAGKESRGARGVRVDFWWRRLRASLRLTVWAPLLPLRIELTDTTLEQVRGWRVPGPAEGPAEPAAEASDEAERRARGCHLQYQRAGVRFLAPFAAHPLDGGRRLTHLLGPDWLLDVSHLVAPHARVLDSRVASLEGGRVVVGREPGVTSIEVRSPLSDSILGEQALAVTDDKVSVLELRVQPVMGISLTLSRGTAHPGEVTATCWAQSALPAPKQEVALSLWLSFSDHTVAPAELYDRRDLGLSVSAEEPGAILPAEEQGAQLGVVVSGAGAEGLPLHVALHPPEPCRRGRHRVPLASGTAWLGLPPASTPAPALPSSPAWSPPATEATMGGKRQVAGSVGGNTGVRGKFERAEEEARKEETEAREEEEEEEEEMVPAPQHVTELELGMYALLGVFCVAIFIFLVNGVVFVLRYQRKEPPDSATDPTSPQPHNWVWLGTDQEELSRQLDRQSPGPPKGEGSCPCESGGGGEAPTLAPGPPGGTTSSSSTLARKEAGGRRKRVEFVTFAPAPPAQSPEEPVGAPAVQSILVAGEEDIRWVCEDMGLKDPEELRNYMERIRGSS

SEQ ID NO: 644 - DNA, 21 bp, artificial
  Description of artificial sequence: Oligonucleotide
gtgtcacctccattgaggtgc

SEQ ID NO: 645 - DNA, 21 bp, artificial
  Description of artificial sequence: Oligonucleotide
gtgtgatcagagaaggacagc

SEQ ID NO: 646 - DNA, 479 bp, Homo sapiens
  misc_feature (397)..(397): n is a, c, g, t or u
  misc_feature (407)..(407): n is a, c, g, t or u
  misc_feature (422)..(422): n is a, c, g, t or u
  misc_feature (442)..(442): n is a, c, g, t or u
  misc_feature (448)..(449): n is a, c, g, t or u
  misc_feature (469)..(469): n is a, c, g, t or u
gtcttcagtgaagtttactgtatattataaacagtcatagaattcaaagacaatcatataaccaactcttttggatggcttaagatgtgccaggtactgtgctaaggacaagagatataaccagatacaaaccagtccccatcctcaatcattacttattcactcaacaaatatttttgagtacttaccctgcaccaggcactagggatataacagataaaaattaagtctctcgcttcatgaagctttcattctgatagagggagacggcaataagcaaataaatggtttattccaccaccccttcaagtcttcactcaaatgttcctttttcaatgagactatataaccaacgtatttaaaatttcaaccaccatcctgcattcactgcttttcntcttgctaanggtgattaatatgtntttatttgactgaacacaangggccnnatacttggtccaacattatnctgggtgtgt

SEQ ID NO: 647 - DNA, 21 bp, artificial
  Description of artificial sequence: Oligonucleotide
aagtctctcgcttcatgaagc

SEQ ID NO: 648 - DNA, 22 bp, artificial
  Description of artificial sequence: Oligonucleotide
aaaagcagtgaatgcaggatgg

SEQ ID NO: 649 - DNA, 1232 bp, Homo sapiens
ctagaggggcggaaagtaacaaggaggtgggggtacaaatcctcagctcctgcttccgcaagcactaacctgctctgaagtgagccaggcagctctggccatcttttcccagccacagaatcaggtgatggtccagaattaagagctgtcacctgtgtcattcactcacaatggaagaaatgaagaagactgccatccggctgcccaaaggcaaacagaagcctataaagacggaatggaattcccggtgtgtccttttcacctacttccaaggggacatcagcagcgtagtggatgaacacttctccagagctctgagcaatatcaagagcccccaggaattgaccccctcgagtcagagtgaaggtgtgatgctgaaaaacgatgatagcatgtctccaaatcagtggcgttactcgtctccatggacaaagccacaaccagaagtacctgtcacaaaccgtgccgccaactgcaacttgcatgtgcctggtcccatggctgtgaatcagttctcaccgtccctggctaggagggcctctgttcggcctggggagctgtggcatttctcctccctggcgggcaccagctccttagagcctggctactctcatcccttccccgctcggcacctggttccagagccccagcctgatgggaaacgtgagcctctcctaagtctcctccagcaagacagatgcctagcccgtcctcaggaatctgccgccagggagaatggcaaccctggccagatagctggaagcacagggttgctcttcaacctgcctcccggctcagttcactataagaaactatatgtatctcgtggatctgccagtaccagccttccaaatgaaactctttcagagttagagacacctgggaaatactcacttacaccaccaaaccactggggccacccacatcgatacctgcagcatctttagtcaagttggaggagaaagacaacacttggtctaagacacggcagcaagacatccctgcatattgttccagataaaaatgaaagctgctcacacccacttgcctccccaatctgttaaacagcttcgtgtctagtatgagctcagtacttgccctgtgaaaatcccagaagcccccgctgtcaatgttccccatccacaccctgcttgctcctgtgtaacagctcagatgatgaataataataaaactgtacttttttggatggtgaaaaaaaaaaaaaaaaaaaa

SEQ ID NO: 650 - protein, 258 aa, Homo sapiens
MEEMKKTAIRLPKGKQKPIKTEWNSRCVLFTYFQGDISSVVDEHFSRALSNIKSPQELTPSSQSEGVMLKNDDSMSPNQWRYSSPWTKPQPEVPVTNRAANCNLHVPGPMAVNQFSPSLARRASVRPGELWHFSSLAGTSSLEPGYSHPFPARHLVPEPQPDGKREPLLSLLQQDRCLARPQESAARENGNPGQIAGSTGLLFNLPPGSVHYKKLYVSRGSASTSLPNETLSELETPGKYSLTPPNHWGHPHRYLQHL

SEQ ID NO: 651 - DNA, 22 bp, artificial
  Description of artificial sequence: Oligonucleotide
ggtgtgatgctgaaaaacgatg

SEQ ID NO: 652 - DNA, 20 bp, artificial
  Description of artificial sequence: Oligonucleotide
cctgtgcttccagctatctg

SEQ ID NO: 653 - DNA, 2960 bp, Homo sapiens
actgcaagctctgcctcccgggttcacgccattctcctgtgtcagcctcctgagtagctgggactacaggcgcccgccaccatgcccggctaattttttttgtatttttagtagagacggggtttcaccatgttagccaggatagtttcaatttccggacctcgtgatccgcccgcctcggcctcccaaagtgctgggattataggcgtgagccaccgcgcccagcccctttcatttttgatatggagttttgttcttgttgcccaggctggaatgcaatggcgcgatctcagctcactgcaacctctgcctcctgggttcaagcgattctcctggttcagcctcctgagtagctgggattacaggaatgcgccaccacacctggctacttttgtatttttagtagagatggggtttctccacgtgcatcaggctagtctcacactcccgacttcagatgatccacccgcctcggcctcccaaagtgctgggattacaggcgtgagccaccgtgcctggccaaagccttcttcactttcattttgtggctgctgttgtgaaatctgcagaacctcaggctgtttggactccatcttctaggttgaattagattacaggtaatctcatggtggaggtgtattctggatcgactcacttttgaaatgtttatgaaagaaattccttcacctcgggacttccacactggagctggcaatcagtatcaccttaatttacctatcacagtgaggcatctctgctctgaggaaaacaaaacaaaacaaaacaaaacaaaaaagaagagctaatggttctgttttgttttgttgttttagagacagggtcttgctctgtcgcccgggctggaatgcagtgacatcatcacagctcactgtagccttgatctcctgggctcaagcgatccttctgcctcagcctgagtagctgggatgggactacagatgcacgccaccacacatggctaatttttttattttttagagacgaggtcccatgtgagccacggtgccccaccttttaaagcaattaccgtaaggaagcaactgtctttagcaaatagaagatcataaacatccttctggagatcttgagatgttgactgtggtttatagggcaatgaaaatctacatacctgagtggggcagtgagacatgagtgccacctatgatccttccagtgagcaattctttctggtgccaggagcccaaaggaaactcagtcaaccagctgtagatgggcttgttccgagtttgttctagaagtcagaactgccagctctgaaagtaggtcacaagtgactggccatccctgggctgctcacaggaagtagctgcaaaggtcagggaaagtttttaatgactatacaggccagtgaatgacaggctttgaggagcttctcttcttggcatctgaaacaggcacatggaggagctgccttggagacagaatgacagctgtggcaatgtgagcctgattcctcagccccataaaatagatgcctttgcaaaaaacccatttatttttttttttctgtttttgagagggagtctcgctctgtccccccaggcggagtgcagtggcgtgatctcggctcactgcaacttctgcctcccgggttcaagcgattctcctgcctcagctcccaagtagctgagattacaggcatccgccaccacacctggccaattttgtattttagtagagacggggttttgccacattggccaggctgggaaaaagcccatttctatacagaggaatcatcttgcaggactcaaggaatgattaagaggaatctacagcattaactttagaaactcgatgcaatattcccaagaggagttaagattgggataagtaatctctgaattaatttcaaccttgagatgttgtgatcctatgaagtcaaagacatatttcttttttctttgtttgagatggagtcttgctctgtcacccaaattggagggcggtgatgtgatctcggcttactacgacctctgcctcctgggttcaagcgattctcagcttcagcctcctgagtagctgagattacaggtgcccgccaccatgcccggctaatttttgtatttttagtagagatgaggtttcactgtgttggccaggctggtcttgaattcttggccccaggtgatctgcccgcctgggcctcccaaagtgctgggattacaggagtgagcaccatgtccggtctagatacatatttctattaatacacatttgcagggattgtttgttactgaagttgacgccttgtgcttgagaatgctatttcactgacacaattgttatggtataaatgtgagagtatagttacaatctggacactattttttgcttgtcttattggcccagcaaccagcttgacactggggactatcaggctccaaataataaccaatgtctcactccaaacagacaggatactacggagccagggtcagcaaacattttctgtaaagggccagatagtaaatattttgggctttgtgggccctatggtctctgtcacaacgattcaactctgctgttgtaacaaaaaagcagtcagacaatatgtaaatgaatgggcatggctgtgttccagtaaaaccacaaaaacaggcagctagctttggtgtggggccctaagagcttggactttgaagccaggttcaaatcctggctttctcaccttctagctccgttaccttaaagaacttcattatcttccttgtattttagtcttttcatctctaaattagtgatagtacttaacagtgttgttataaagattaaacgagttaagtttgtaaagtacttaaacagtgcctaccaggtagtaagtgctatagcagagtgtgttagataatgaaacatcctgtgctgtggatatattattcccattacgatttggattcaaataaagaaatacatgactt

SEQ ID NO: 654 - DNA, 21 bp, artificial
  Description of artificial sequence: Oligonucleotide
tcaccttctagctccgttacc

SEQ ID NO: 655 - DNA, 22 bp, artificial
  Description of artificial sequence: Oligonucleotide
ctaagagcttggactttgaagc

SEQ ID NO: 656 - DNA, 2059 bp, Homo sapiens
agcacagaaggaggaaggacagcacagctgacagccgtactcaggaagcttctggatcctaggcttatctccacagaggagaacacacaagcagcagagaccatggggcccctctcagcccctccctgcacacagcgcatcacctggaagggggtcctgctcacagcatcacttttaaacttctggaatccgcccacaactgcccaagtcacgattgaagcccagccacccaaagtttctgaggggaaggatgttcttctacttgtccacaatttgccccagaatcttgctggctacatttggtacaaagggcaaatgacatacctctaccattacattacatcatatgtagtagacggtcaaagaattatatatgggcctgcatacagtggaagagaaagagtatattccaatgcatccctgctgatccagaatgtcacgcaggaggatgcaggatcctacaccttacacatcataaagcgacgcgatgggactggaggagtaactggacatttcaccttcaccttacacctggagactcccaagccctccatctccagcagcaacttaaatcccagggaggccatggaggctgtgatcttaacctgtgatcctgcgactccagccgcaagctaccagtggtggatgaatggtcagagcctccctatgactcacaggttgcagctgtccaaaaccaacaggaccctctttatatttggtgtcacaaagtatattgcaggaccctatgaatgtgaaatacggaacccagtgagtgccagccgcagtgacccagtcaccctgaatctcctcccaaagctgtccaagccctacatcacaatcaacaacttaaaccccagagagaataaggatgtcttaaccttcacctgtgaacctaagagtaagaactacacctacatttggtggctaaatggtcagagcctccctgtcagtcccagggtaaagcgacccattgaaaacaggatcctcattctacccaatgtcacgagaaatgaaacaggaccttatcaatgtgaaatacgggaccgatatggtggcatccgcagtgacccagtcaccctgaatgtcctctatggtccagacctccccagcatttacccttcattcacctattaccgttcaggagaaaacctctacttgtcctgcttcgccgagtctaacccacgggcacaatattcttggacaattaatgggaagtttcagctatcaggacaaaagctctctatcccccaaataactacaaagcatagtgggctctatgcttgctctgttcgtaactcagccactggcaaggaaagctccaaatccatcacagtcaaagtctctgactggatattaccctgaattctactagttcctccaattccattttctcccatggaatcacgaagagcaagacccactctgttccagaagccctataagctggaggtggacaactcgatgtaaatttcatgggaaaacccttgtacctgacatgtgagccactcagaactcaccaaaatgttcgacaccataacaacagctactcaaactgtaaaccaggataacaagttgatgacttcacactgtggacagtttttccaaagatgtcagaacaagactccccatcatgataaggctcccacccctcttaaccgtccttgctcatgcctgcctctttcacttggcaggataatgcagtcattagaatttcacatgtagtagcttctgagggtaacaacagagtgtcagatatgtcatctcaacctcaaacttttacgtaacatctcaggggaaatgtggctctctccatcttgcatacagggctcccaatagaaatgaacacagagatattgcctgtgtgtttgcagagaagatggtttctataaagagtaggaaagctgaaattatagtagagtctcctttaaatgcacattgtgtggatggctctcaccatttcctaagagatacagtgtaaaacgtgacagtaatactgattctagcagaataaaacatgtaccacatttgctaaaaaaaaaaaaaaaaaaaaaaaaaaaaa

SEQ ID NO: 657 - protein, 419 aa, Homo sapiens
MGPLSAPPCTQRITWKGVLLTASLLNFWNPPTTAQVTIEAQPPKVSEGKDVLLLVHNLPQNLAGYIWYKGQMTYLYHYITSYVVDGQRIIYGPAYSGRERVYSNASLLIQNVTQEDAGSYTLHIIKRRDGTGGVTGHFTFTLHLETPKPSISSSNLNPREAMEAVILTCDPATPAASYQWWMNGQSLPMTHRLQLSKTNRTLFIFGVTKYIAGPYECEIRNPVSASRSDPVTLNLLPKLSKPYITINNLNPRENKDVLTFTCEPKSKNYTYIWWLNGQSLPVSPRVKRPIENRILILPNVTRNETGPYQCEIRDRYGGIRSDPVTLNVLYGPDLPSIYPSFTYYRSGENLYLSCFAESNPRAQYSWTINGKFQLSGQKLSIPQITTKHSGLYACSVRNSATGKESSKSITVKVSDWILP

SEQ ID NO: 658 - DNA, 21 bp, artificial
  Description of artificial sequence: Oligonucleotide
gtctctgactggatattaccc

SEQ ID NO: 659 - DNA, 21 bp, artificial
  Description of artificial sequence: Oligonucleotide
cctgccaagtgaaagaggcag

SEQ ID NO: 660 - DNA, 7289 bp, Homo sapiens
gctgcaattcaagttggctgggggccggtagtgagatctagggctacttcaacaaaactttgctgcccttcctgctcctcttgtcttcttttctcctgataccttttgatgctctgcacatgttatttgcatagcaaaggcactaagctttccaggaagagagggcaccacttccacccccaataagtcttttttcccgtcttttctttcttttcctttccttttttggggggtggggagggagagaaagggggtttgcaaaggcagcatctcagagtgatagcctagatgtattgaaggcatctcttattctgccaaatcggaaagtcagttctctaaagcccgggttagccagaccatagggttttattctggctgcagaataactggctggtgtggctttgcaaaggggggcaaaaaataaaaaaataaaaaaaattaaaaaaagttagagaggagagggagtacgtgagtcgtccagtgcaatctctattgtctgaaacttactttttatcagaatttgaagatgaaaacggttaaaaaatggccatactttagtaactaatcagcctaatgctttgcttatgaaaacttttaccatcattatttttttcattttggattgagaaaatgaatccagatatagaagaaagtgcaggatgttggataaaagtggctcttaaacagtggaacatccaataactaatttgcaagaagttttaaagaaataaaattgttatgcttcgattttggtatggtattgactctttagcacataggtagccctcaaaaaaatcatccagttttctaaattatggaaattttgtggaagacgttgacctggattttgagcctcatcatggcttcatcggaatttcatagtgaccacaggctttcatacagttctcaagaggaattcctgacttatcttgaacactaccagctaactattccaataagggttgatcaaaatggagcatttctcagctttactgtgaaaaatgataaacactcaaggagaagacggagtatggaccctattgatccacagcaggcagtatctaagttattttttaaactttcagcctatggcaagcactttcatctaaacttgactctcaacacagattttgtgtccaaacattttacagtagaatattgggggaaagatggaccccagtggaaacatgattttttagacaactgtcattacacaggatatttgcaagatcaacgtagtacaactaaagtggctttaagcaactgtgttgggttgcatggtgttattgctacagaagatgaagagtattttatcgaacctttaaagaataccacagaggattccaagcattttagttatgaaaatggccaccctcatgttatttacaaaaagtctgcccttcaacaacgacatctgtatgatcactctcattgtggggtttcggatttcacaagaagtggcaaaccttggtggctgaatgacacatccactgtttcttattcactaccaattaacaacacacatatccaccacagacagaagagatcagtgagcattgaacggtttgtggagacattggtagtggcagacaaaatgatggtgggctaccatggccgcaaagacattgaacattacattttgagtgtgatgaatattgttgccaaactttaccgtgattccagcctaggaaacgttgtgaatattatagtggcccgcttaattgttctcacagaagatcagccaaacttggagataaaccaccatgcagacaagtccctcgatagcttctgtaaatggcagaaatccattctctcccaccaaagtgatggaaacaccattccagaaaatgggattgcccaccacgataatgcagttcttattactagatatgatatctgcacttataaaaataagccctgtggaacactgggcttggcctctgtggctggaatgtgtgagcctgaaaggagctgcagcattaatgaagacattggcctgggttcagcttttaccattgcacatgagattggtcacaattttggtatgaaccatgatggaattggaaattcttgtgggacgaaaggtcatgaagcagcaaaacttatggcagctcacattactgcgaataccaatcctttttcctggtctgcttgcagtcgagactacatcaccagctttctagattcaggccgtggtacttgccttgataatgagcctcccaagcgtgactttctttatccagctgtggccccaggtcaggtgtatgatgctgatgagcaatgtcgtttccagtatggagcaacctcccgccaatgtaaatatggggaagtgtgtagagagctctggtgtctcagcaaaagcaaccgctgtgtcaccaacagtattccagcagctgaggggacactgtgtcaaactgggaatattgaaaaagggtggtgttatcagggagattgtgttccttttggcacttggccccagagcatagatgggggctggggtccctggtcactatggggagagtgcagcaggacctgcgggggaggcgtctcctcatccctaagacactgtgacagtccagcaccttcaggaggtggaaaatattgccttggggaaaggaaacggtatcgctcctgtaacacagatccatgccctttgggttcccgagattttcgagagaaacagtgtgcagactttgacaatatgcctttccgaggaaagtattataactggaaaccctatactggaggtggggtaaaaccttgtgcattaaactgcttggctgaaggttataatttctacactgaacgtgctcctgcggtgatcgatgggacccagtgcaatgcggattcactggatatctgcatcaatggagaatgcaagcacgtaggctgtgataatattttgggatctgatgctagggaagatagatgtcgagtctgtggaggggacggaagcacatgtgatgccattgaagggttcttcaatgattcactgcccaggggaggctacatggaagtggtgcagataccaagaggctctgttcacattgaagttagagaagttgccatgtcaaagaactatattgctttaaaatctgaaggagatgattactatattaatggtgcctggactattgactggcctaggaaatttgatgttgctgggacagcttttcattacaagagaccaactgatgaaccagaatccttggaagctctaggtcctacctcagaaaatctcatcgtcatggttctgcttcaagaacagaatttgggaattaggtataagttcaatgttcccatcactcgaactggcagtggagataatgaagttggctttacatggaatcatcagccttggtcagaatgctcagctacttgtgctggaggtgtccaaagacaggaggtggtctgtaaaaggttggatgacaactccattgtccagaacaattactgtgatcctgacagtaagccacctgaaaatcaaagagcctgcaacactgagccctgcccacctgagtggttcattggggattggttggaatgcagcaagacttgtgatggtgggatgcgcacaagggcagtgctctgcatcaggaagatcggaccttctgaggaggagacgctggactacagtggttgtttaacacaccggcctgtcgaaaaagagccctgcaacaaccagtcatgtccaccacagtgggtggctttggactggtctgagtgtactccaaaatgtggtccaggattcaagcatcggattgttctgtgcaagagcagtgacctttctaagacattcccagctgcacaatgtccagaggaaagcaaacctcctgtccgcatccgctgcagtttgggccgctgccctcctcctcgctgggtcacaggagactggggccagtgttctgctcagtgtggccttggacagcagatgagaactgtgcagtgtctctcctacaccggacaggcatctagtgactgtctagaaactgttcggcctccatcaatgcagcagtgtgaaagcaaatgtgacagtacccccatttctaatactgaagagtgcaaagatgtgaataaagtggcttattgcccactggtgctgaagttcaagttctgcagtcgagcatacttcagacagatgtgttgtaagacctgccaaggacactgacccacagaaagccagagagagtgccttgtcatttcatcatggaaatgcatccatcaaagagagccacccagaggaagaggattgatgtccttgcaaatgcattaccctgtggaaaacgtaaccactggtcagccctagctgacaaaatttcaatattattttagcttctgtgaagtgggatttattgatccaaagtgctggacacggtattaggagggaatgccagattggagagatccaaacaacacagggagacttgcttactgtggagcgtttgtgttctttcgagtaaatccaatagcctgtttacctccttggaccattaagataatttttattatggacttagcaatgacactgaatccatttgtatttaaaactgtttaaaatgtagctgttatgacttggtcaactatggaagtgaagaaggttcagaattcttaagtcatagcttaaaaatatttactgtactttatctcactacaacagcaccacaatttaaattataaaacgggctttgaactataatttaaggagcaattataaatcaaaagtaatgaaagtttgtattatttttcttcattccacttaatttccttaggaataatcccctggttctgaacactgctgtgagccatatataaaactatattaaactgaacaataatgaggggcatagtttaaagcagtgcatcagttactgcagctgtgcaagtctataaactcagtgctgaaagactgtggccaacttgccattgtgcaagtaaagctgagatttccattaaaactttaagagaaaaacatttcaatttcatgcagaaaccagacctggggtatggtacagaccaaaggaccaggccctttgctgccaccacacaggatgccttagttcttatttgagtccctccaactcacttgtgtttacatcctccccagccacagcacggcttctgccctttggattgctgcacgtgtgttgagcttactgagatgataccatgcaaaagatagactggctcggtaaccaggcagacccttttgcagtttgttgacaattacgatgagttccagatgtcccttctttgatatggtagaagggcatttatttatatgagagcaaatgtgtgtgtgtgtttgcgggcgcttttaagtgtgtggatagatgagtgtgcttgcacataatgtgctatttctgtgagttttaaagtaggcaagggataataaccaaagaagaaaatttcatgaagactagacatcataaagcataattttaatagtcactcaaccaagtattttttattttttatggatactctgaatggcaattaaatgtgaaacccagtttcttgggcaagtcaaattctggaatcacatccacctaaattaaaatgactagctcgtattttccccatcttcaagtttcacatcctggtcatcaaaagactcgacagcaagacttagaatgaaaaagggtacttgtttatattaatattttttacttgaacacgtgtagcttgcagcaggttcttgatgaatgtgctttgtgtccaaaatgcctccccattgtacacaggtgtacaccatgcatgcaccaacacctaaaactcaaaactaaatggctattttgtaaggttaatactttcagttaaacagcatgtttgacttgattccatcatggtgctcttaaattacatgtcagtgcatcacatatatcatgatctaatgcagatgactaggctttttccaaaaggaagacagaccctcagacaccaaaagccaatctaaacaactcccaggtttgctgtggacaatcagcatggaatgttttctgcactctcagtcatgaccatctgtatcttgttacctgctttctctctcaacaccacagttctcaaccctgagccttccagagagagctattgatgatacaagaggaatcaccagggcccggatctaagatgcccttagaagaccagcccaagtgccgtcttagccattcagtgaagggcaaacagcccatgggtagtatggcccgagcactgaattcccttgcgccttttcaaagaacagttaacttggtgctaatgtgccctggtgaaataaataaaagatgggcagtttctgtggcattttaggcataggtttgcaatccagatctgattttctccaacataaatatcagctcatgttcttatttcaaaaagatttcttattaccgactaaaagctattttttacctcacctggaaactaccattgtgagggccatcccccaggcactgcacagcaccttggctgatgctggaagaggagggcagtcagtgtcacttctgggatgtgccccagcactgagaacaaaatgcaggcatcccccggggcagcatcagagtgcctttctagagggagccacgcacagaatgtaacaggatgaaacagtttcaagtaagccttgaattgaaacctgagtaggttaaaacaattctatttcatagcacatcacaatactgctgctactctgtagccacccccatggctacatgatgccctattcctaaataataacaatagcattgtcagtggaggctgggccaccatggcagaccttccaaaagtagtgagctacatagactacttagggaaccccagggaaactggtaccctacacctgggagcagtatctgccactgggataaagtcctactaaaaaaggaacggtaaatgtaccctaatgattaaaccccgtgagatacatatgatttccaaatagtccatttcattaggaacttttttgtttgaatgaatgtcacataggtatcctcagtaacacagaacgaaattacctttgtattattgtgattagttgttgcttattattttatactcagtaataatgtggtacactgttaatttttttgcttttgtaaattatattctaatttattgccatgtttcctaacacttgtcctacattcattctcctgcttgtaatgaaaatgaaaaaatcattgtaacacttgatggagtgaaattccacgccaggcacagaatttttttgacatagataatttagtaaaataaaaattcagcttataataatgataaaaaaaaaaaaaaaaaaaaaa

SEQ ID NO: 661 - protein, 1117 aa, Homo sapiens
MEILWKTLTWILSLIMASSEFHSDHRLSYSSQEEFLTYLEHYQLTIPIRVDQNGAFLSFTVKNDKHSRRRRSMDPIDPQQAVSKLFFKLSAYGKHFHLNLTLNTDFVSKHFTVEYWGKDGPQWKHDFLDNCHYTGYLQDQRSTTKVALSNCVGLHGVIATEDEEYFIEPLKNTTEDSKHFSYENGHPHVIYKKSALQQRHLYDHSHCGVSDFTRSGKPWWLNDTSTVSYSLPINNTHIHHRQKRSVSIERFVETLVVADKMMVGYHGRKDIEHYILSVMNIVAKLYRDSSLGNVVNIIVARLIVLTEDQPNLEINHHADKSLDSFCKWQKSILSHQSDGNTIPENGIAHHDNAVLITRYDICTYKNKPCGTLGLASVAGMCEPERSCSINEDIGLGSAFTIAHEIGHNFGMNHDGIGNSCGTKGHEAAKLMAAHITANTNPFSWSACSRDYITSFLDSGRGTCLDNEPPKRDFLYPAVAPGQVYDADEQCRFQYGATSRQCKYGEVCRELWCLSKSNRCVTNSIPAAEGTLCQTGNIEKGWCYQGDCVPFGTWPQSIDGGWGPWSLWGECSRTCGGGVSSSLRHCDSPAPSGGGKYCLGERKRYRSCNTDPCPLGSRDFREKQCADFDNMPFRGKYYNWKPYTGGGVKPCALNCLAEGYNFYTERAPAVIDGTQCNADSLDICINGECKHVGCDNILGSDAREDRCRVCGGDGSTCDAIEGFFNDSLPRGGYMEVVQIPRGSVHIEVREVAMSKNYIALKSEGDDYYINGAWTIDWPRKFDVAGTAFHYKRPTDEPESLEALGPTSENLIVMVLLQEQNLGIRYKFNVPITRTGSGDNEVGFTWNHQPWSECSATCAGGVQRQEVVCKRLDDNSIVQNNYCDPDSKPPENQRACNTEPCPPEWFIGDWLECSKTCDGGMRTRAVLCIRKIGPSEEETLDYSGCLTHRPVEKEPCNNQSCPPQWVALDWSECTPKCGPGFKHRIVLCKSSDLSKTFPAAQCPEESKPPVRIRCSLGRCPPPRWVTGDWGQCSAQCGLGQQMRTVQCLSYTGQASSDCLETVRPPSMQQCESKCDSTPISNTEECKDVNKVAYCPLVLKFKFCSRAYFRQMCCKTCQGH

SEQ ID NO: 662 - DNA, 21 bp, artificial
  Description of artificial sequence: Oligonucleotide
atactgaagagtgcaaagatg

SEQ ID NO: 663 - DNA, 21 bp, artificial
  Description of artificial sequence: Oligonucleotide
tccacagggtaatgcatttgc

SEQ ID NO: 664 - DNA, 1541 bp, Homo sapiens
gtctcagcgcagaaggaggaaggacagcacagctgacagccgtgctctggaagcttctggatcctaggctcatctccacagaggagaacatgcacgcagcagagatcatggggcccctctcagcccctccctgcacagagcacatcaaatggaaggggctcctgctcacagcattacttttaaacttctggaacttgcctaccactgcccaagtcatgattgaagcccagccacccaaagtgtccgaggggaaggatgttcttctacttgtccacaatttgccccagaatcttactggctacatctggtacaaagggcaaatcagggacctctaccattacattacatcatatgtagtagacggtcaaataattatatatggaccggcatacagtggacgagaaacagtatattccaatgcatccctgctgatccagaatgtcacccgggaggacgcaggatcctacaccttacacatcataaagcgaggtgatgggactagaggagtaactggatatttcaccttcaccttatacctggagactcccaagccctccatctccagcagcaacttaaaccccagggaggccatggagactgtgatcttaacctgtaatcctgagactccggacgcaagctacctgtggtggatgaatggtcagagcctccctatgactcataggatgcagctgtctgaaaccaacaggaccctctttctatttggtgtcacaaagtatactgcaggaccctatgaatgtgaaatatggaactcagggagtgccagccgcagtgacccagtcaccctgaatctcctccatggtccagacctccccagaattttcccttcagtcacctcttactattcaggagagaacctcgacttgtcctgcttcgcaaactctaacccaccagcacagtattcttggacaattaatgggaagtttcagctatcaggacaaaagctctttatccctcagattactccaaagcataatgggctctatgcttgctctgctcgtaactcagccactggcgaggaaagctccacatccttgacaatcagagtcattgctcctccaggattaggaacttttgctttcaataatccaacgtagcagccgtgatgtcatttttgtatttcaggaagactggcaggagatttatggaaaagactatgaaaaggactcttgaatacaagttcctgataacttcaagatcataccactggactaagaactttcaaaattttgatgaacaggctgataccttcatgaaattcaagacaaagaagaaaagaactccatttcattggactaaataacaaaaggataatgttttcataattttttattggaaaatgtgctgattttttgaatgttttatcctccagatttatgaatttttttcttcagcaattggtaaagtatacttttgtaaacaaaaattgaaacatttgcttttgctctctgagtgccccagaattgggaatctattcatgaatattcatatgtttatggtaataaagttatttgcacaagttt

SEQ ID NO: 665 - protein, 335 aa, Homo sapiens
MGPLSAPPCTEHIKWKGLLLTALLLNFWNLPTTAQVMIEAQPPKVSEGKDVLLLVHNLPQNLTGYIWYKGQIRDLYHYITSYVVDGQIIIYGPAYSGRETVYSNASLLIQNVTREDAGSYTLHIIKRGDGTRGVTGYFTFTLYLETPKPSISSSNLNPREAMETVILTCNPETPDASYLWWMNGQSLPMTHRMQLSETNRTLFLFGVTKYTAGPYECEIWNSGSASRSDPVTLNLLHGPDLPRIFPSVTSYYSGENLDLSCFANSNPPAQYSWTINGKFQLSGQKLFIPQITPKHNGLYACSARNSATGEESSTSLTIRVIAPPGLGTFAFNNPT

SEQ ID NO: 666 - DNA, 21 bp, artificial
  Description of artificial sequence: Oligonucleotide
gctctatgcttgctctgctcg

SEQ ID NO: 667 - DNA, 21 bp, artificial
  Description of artificial sequence: Oligonucleotide
taaatctcctgccagtcttcc

SEQ ID NO: 668 - DNA, 2243 bp, Homo sapiens
cggcaatgtccgccacctggtgcagcccagagggtcaaggaatgggccagggccctggcagggaggtcggaggaaattccgccgccagcggccccgcctctcccataaggaacccatgcctttctgaagcaggactgaaggggcccccaagtgcccaccccctgcggttatgtctcctccatagattggtctgcttctctggaggcctcacgtccattcagctctcacctcgcacctgctgtagccaccagtgggcccagctcttctcacctgcctgcttcccccagtggcgtgctcctggctgtagtttggatgattcccgttctctcacaagaatccgtccagtccatcttcctggcccctccctggactgactttggagacctagccccagaaagcctcccttcttctccaggtcccctccgccctagtccctgcctgtctcatctaacgccccaaaccttcatttgggccttccttcctcatgtctgccctgagcgcggggtggaaatgctcccttctgtgggctccagcagatcccttgttttcctgtcagttggacccctcacctggcctccagggaagaatgcagagaaaagcaaggagagactctagttaagaggtgctggctgcggggatccagacagggcacattgggggcatggaagtgccagggtggttttcaggagctctggtgaagtgggtggagcatcagcgtttgctcagttaagggagaggtagagaggggcccgtgaagtcctttgtcacttctcttgccttagtgtgcctcccaatactcccttcttcctgcccccacaccccatccccagctagcccaggctccaggtcaggaggggagggtgctgggcctgacatggctatataccctcccaggagtaaaagccaagcaagaggttgtttttgccaagaatcacagaatgttagagctgacaggacccttgaaggtcacttagccttcttaggcaaacgcctgcaaaacagaagcctggagaggggagtgacctgctcagagtcattgcagagccgggatggggaccaggtctcccatctcctactttatgacgccctcttccctcttgatgatgtcttttcaaagcaaatgaagtgccttttcccgaggctggggctgggggtggctgggaggggaagggaagggagaggcaagctggctgtgaactgtcctgttgtggggctggagctgctcccacctccctgacctacccctgctgcaccattcccccagctgggctggaaggttccataactggccagctgcccccataactggcagcattcccagacccagggtactctaataggggcggctcaggcactgagactaccgctcaaccccagggtggttttcaggagtccgaggtagccttcaatcactggactccatggccttcccttcgtgttgaccggaccttccttccagggcttttcctttgggggaggcggagaggggagaagaaggaagggaagggcagaaggaaggagggaagaaaagaaagcaaaggaacagaaggaaggaaagaaagatgggaggaagtgcagcaggaatagcaccctctccccgggaggccctagcttccgtgaggggccatcaccagccattccttggagggggctttctccccttttgcttgagcagggttcccaggagggagaaagagaagacaagagcctgatgcccaactttgtgtgtgtggggacgggggagtcagggccccccaagtcccacaatagccccaatgtttgcctatccacctcccccaagcccctttacctatgctgctgctaacgctactgctgctgctgctgctgctgcttaaaggctcatgcttggagtggggactggtcggtgcccagaaagtctcttctgccactgacgcccccatcagggattgggccttctttcccccttcctttctgtgtctcctgcctcatcggcctgccatgacctgcagccaagcccagccccgtggggaaggggagaaagtgggggatggctaagaaagctgggagatagggaacagaagagggtagtgggtgggctaggggggctgccttatttaaagtggttgtttatgattcttatactaatttatacaaagatattaaggccctgttcattaagaaattgttcccttcccctgtgttcaatgtttgtaaagattgttctgtgtaaatatgtctttataataaacagttaaaagctg

SEQ ID NO: 669 - DNA, 21 bp, artificial
  Description of artificial sequence: Oligonucleotide
ttctgaagcaggactgaaggg

SEQ ID NO: 670 - DNA, 21 bp, artificial
  Description of artificial sequence: Oligonucleotide
ggtctccaaagtcagtccagg

SEQ ID NO: 671 - DNA, 1699 bp, Homo sapiens
ctcagagagtttctggatcctaggcttatctccacagaggagaacacacaagcagcagagaccatgggaaccctctcagcccctccctgcacacagcgcatcaaatggaaggggctcctgctcacagcatcacttttaaacttctggaacctgcccaccactgcccaagtcacgattgaagcccagccacccaaagtttccgaggggaaggatgttcttctacttgtccacaatttgccccagaatcttaccggctacatctggtacaaagggcaaatgagggacctctaccattacattacatcatatgtagtagacggtgaaataattatatatgggcctgcatatagtggacgagaaacagcatattccaatgcatccctgctgatccagaatgtcacccgggaggacgcaggatcctacaccttacacatcataaagggagatgatgggactagaggagtaactggacgtttcaccttcaccttacacctggagactcctaagccctccatctccagcagcaacttaaatcccagggagaccatggaggctgtgagcttaacctgtgaccctgagactccagacgcaagctacctgtggtggatgaatggtcagagcctccctatgactcacagcttgaagctgtccgaaaccaacaggaccctctttctattgggtgtcacaaagtatactgcaggaccctatgaatgtgaaatacggaacccagtgagtgccagccgcagtgacccagtcaccctgaatctcctcccgaagctgcccaagccctacatcaccatcaacaacttaaaccccagggagaataaggatgtcttaaacttcacctgtgaacctaagagtgagaactacacctacatttggtggctaaatggtcagagcctcccggtcagtcccagggtaaagcgacccattgaaaacaggatcctcattctacccagtgtcacgagaaatgaaacaggaccctatcaatgtgaaatacgggaccgatatggtggcatccgcagtgacccagtcaccctgaatgtcctctatggtccagacctccccagaatttacccttcattcacctattaccgttcaggagaagtcctctacttgtcctgttctgcggactctaacccaccggcacagtattcttggacaattaatgaaaagtttcagctaccaggacaaaagctctttatccgccatattactacaaagcatagcgggctctatgtttgctctgttcgtaactcagccactggcaaggaaagctccaaatccatgacagtcgaagtctctggtaagtggatcccagcatcgttggcaatagggttttaggtggagtctatctggcattcagagaagagtcaggaaaacaattgtattcccagcctgtgtccctagggcacaagcaaatcccaaattctcctcctgaaccctccaaatttgtctaagaacttcgaaaactttaacaaacaggctgatatcttcataatattcccagcctagaccaagcaggaagaacattgatttcattgaaataattgataataatgaagataatgtttttatgatttttatttgaaaatttgctaattctttaaatggtttgttttctacattgatggaatttttctcttttaatctatctacagcttatagcagttcaataaactatacttctgggaaccgt

SEQ ID NO: 672 - protein, 426 aa, Homo sapiens [sequence omitted]

SEQ ID NO: 673 - DNA, 21 bp, artificial
  Description of artificial sequence: Oligonucleotide
cctgaatgtcctctatggtcc

SEQ ID NO: 674 - DNA, 21 bp, artificial
  Description of artificial sequence: Oligonucleotide
tggctgagttacgaacagagc

SEQ ID NO: 675 - DNA, 10724 bp, Homo sapiens
ctttccaatatccgtcttcggagcgcacgggaatccgccgagctctgcgtgcaggcccttttttcttttgaggttcacattttttgaaattttacgccagggcttttgtaatttcctcccccgcccgctgacggtcctggagtcgctcggggctttaggccggttatgcaacgtgtaccgctcggggctgccggctgcacctccgccgcgcctcgccgctcactgcgctagacccggcgccccgcgtctcgcttcgcgggcagtcagggggccggcgctctgtcgaggtctccagctagagcagggagcccgagcccgagggagtccccggagccgacgaagggcttattagaccctgactcttttctgaggcgcgcagattttgtctttgatcactccctctccgcgggtctacggccgcgcgctttcggcgccggcgatggggagaagacggaggctgtgtctccagctctacttcctgtggctgggctgtgtggtgctctgggcgcagggcacggccggccagcctcagcctcctccgcccaagccgccccggccccagccgccgccgcaacaggttcggtccgctacagcaggctctgaaggcgggtttctagcgcccgagtatcgcgaggagggtgccgcagtggccagccgcgtccgccggcgaggacagcaggacgtgctccgagggcccaacgtgtgcggctccagattccactcctactgctgccctggatggaagacgctccctggaggaaaccagtgcattgtcccgatttgtagaaatagttgtggagatggattttgttcccgtcctaacatgtgtacttgttccagtgggcaaatatcatcaacctgtggatcaaaatcaattcagcagtgcagtgtgagatgcatgaatggtgggacctgtgcagatgaccactgccagtgccagaaaggatatattggaacttattgtggacaacctgtctgtgaaaatggatgtcagaatggtggacgttgcatcggacccaaccgctgtgcttgtgtttatgggttcactggtccacagtgtgaaagagattacaggacaggcccgtgtttcactcaggtcaacaaccagatgtgccaagggcagctgacaggcattgtctgcacgaagactctgtgctgtgccaccattggacgggcgtggggccatccctgtgagatgtgtccagcccagcctcagccctgccgacggggtttcatccccaacatccgcactggagcttgccaagatgttgatgaatgccaggctatcccagggatatgccaaggaggaaactgtatcaatacagtgggctcttttgaatgcagatgccctgctggtcacaaacagagtgaaactactcagaaatgtgaagacattgatgagtgcagcatcattcctgggatatgtgaaactggtgaatgttccaacaccgtgggaagctatttttgtgtttgtccacgtggatatgtaacctcaacagatggctctcgatgcatcgatcagagaacaggcatgtgtttctcgggcctggtgaatggccgctgtgcacaagagctcccggggagaatgacgaaaatgcagtgctgctgtgagcctggccgctgctggggcatcggaaccattcctgaagcctgtcctgtcagaggttctgaggaatatcgcagactttgcatggatggacttccaatgggaggaattccagggagtgctggttccagacctggaggcactgggggaaatggctttgccccaagtggcaatggcaatggctatggcccaggagggacaggcttcatccccatccctggaggcaatggcttttctcctggcgttgggggagccggtgtgggggccgggggacagggacctatcatcactggactaacaattctgaaccagacaatagatatctgtaagcatcatgctaacctttgtttaaatggacgctgtataccaactgtctcaagctaccgatgtgaatgcaacatgggttataagcaggatgcaaatggagattgtatagatgttgatgaatgcacatcaaatccctgcactaatggagattgtgttaacacacctggttcctattattgtaaatgtcatgctggattccagaggactcctaccaagcaagcatgcattgatattgatgagtgcatccagaatggggttctttgtaaaaacggtcgatgcgtgaacacagatggaagtttccagtgcatttgcaatgccggctttgaattaactacagatggaaaaaactgtgttgatcatgatgaatgtacaactaccaacatgtgtttgaatggaatgtgcatcaatgaagatggcagcttcaagtgcatctgcaaaccaggatttgtcttggctccaaatgggcgttactgtactgatgttgatgaatgccagaccccaggaatctgcatgaatgggcactgcatcaacagtgaagggtccttccgctgtgactgtcccccaggcctggctgtgggcatggatggacgtgtgtgtgttgatactcacatgcgcagtacctgctatggaggaatcaagaaaggagtgtgtgtgcgtcctttccccggtgcagtgaccaagtccgaatgctgctgtgccaatccagactatggttttggagaaccctgccagccatgccctgcaaaaaattcagctgaattccacggcctttgtagtagtggagtaggtatcactgtggatggaagagatatcaatgaatgtgctttggatcctgatatatgtgccaatgggatttgtgaaaacttacgtggtagttaccgttgtaattgcaacagtggctatgaaccagatgcctctggaagaaactgtattgacattgatgaatgtttagtaaacagactgctttgtgataacggattgtgccgaaacacgccaggaagttacagctgtacgtgcccaccagggtatgtgttcaggactgagacagagacctgtgaagatataaatgaatgtgaaagcaacccatgtgtcaatggggcctgcagaaacaaccttggatctttcaattgtgaatgttcgcccggcagcaaactcagctccacaggattgatctgtattgacagcctgaaggggacctgttggctcaacatccaggacagccgctgtgaggtgaatattaatggagccactctgaaatctgaatgctgtgccaccctcggagccgcctgggggagcccctgtgagcggtgtgaactagatacagcttgcccaagagggcttgccaggattaaaggtgttacgtgtgaagatgttaatgagtgtgaggtgttccctggcgtttgtccaaatggacgctgtgtcaacagtaagggatcttttcattgcgagtgccctgaaggccttacgttggatgggactggccgtgtatgtttggatattcgcatggagcagtgttacttgaagtgggatgaagatgaatgcatccaccccgttcctggaaagttccgcatggatgcctgctgctgtgctgtcggggcggcttggggcaccgagtgtgaggagtgccccaaacctggcaccaaggaatacgagacgctgtgcccccgcggggctggctttgctaaccgaggggatgttcttactgggcggccattttacaaagacatcaatgaatgcaaagcatttcctgggatgtgcacttatgggaagtgcagaaatacaatcggaagcttcaaatgccgttgcaatagtggctttgctctagacatggaggaaagaaactgcacggacatcgacgagtgcaggatttctcctgacctctgtggcagtggaatctgcgtcaatacaccgggcagctttgagtgcgagtgcttcgaaggctatgaaagtggcttcatgatgatgaagaactgcatggacattgacgaatgtgaacgtaaccctctcctttgtaggggtggcacctgtgtgaacactgagggcagctttcagtgtgactgcccactgggacacgagctgtcaccatcccgtgaggactgtgtggatattaatgaatgctccctgagtgacaatctctgcagaaatggaaaatgtgtgaacatgattggaacctatcagtgctcttgcaatcctggatatcaggctacgccagaccgccagggctgtacagatattgatgaatgtatgataatgaacggaggctgtgacacccagtgcacaaattcagagggaagctacgaatgcagctgcagtgagggttatgccctgatgccagatgggagatcgtgtgcagacattgatgaatgtgaaaacaatcctgatatctgtgatggcggccagtgtaccaacattcctggagagtatcgctgcctctgctatgatggcttcatggcttccatggacatgaaaacatgcattgatgtcaatgaatgtgacctaaattcaaatatctgcatgtttggggaatgtgagaacacaaagggatccttcatttgccactgtcagctgggttactcagtgaagaaggggaccacaggatgtacagatgtggatgagtgtgaaattggtgctcataactgcgacatgcatgcctcatgtctgaatatcccaggaagcttcaagtgtagctgcagagaaggctggattggaaacggcatcaagtgtattgatctggacgaatgttctaatggaacccaccagtgtagcatcaatgctcagtgtgtaaataccccgggctcataccgctgtgcctgctccgaaggtttcactggtgatggctttacctgctcagatgttgatgagtgtgcagaaaacataaacctctgtgagaacggacagtgccttaatgtcccgggtgcatatcgctgcgagtgtgagatgggcttcactccagcctcagacagcagatcctgccaagatattgatgaatgctccttccaaaacatttgtgtctttggaacatgtaataacctgcctggaatgtttcattgcatctgcgatgatggttatgaattggacagaacaggagggaactgtacagatattgatgagtgtgcagatcctataaactgtgtcaatggcctatgtgtcaacacgcctggtcgctatgagtgtaactgcccacccgattttcagttgaacccaactggtgtgggttgtgttgacaaccgtgtgggcaactgctacctgaagtttggacctcgaggagatgggagtctgtcttgcaacaccgagatcggggtgggcgtcagtcgctcttcatgctgctgctctctgggaaaggcctggggaaacccctgtgagacatgcccccctgtcaatagcactgaatattacaccctgtgtcccggaggtgaaggcttcagacctaaccccatcacaatcattttagaagacattgacgaatgccaggagttaccaggtctctgccagggtggaaactgcatcaacacttttgggagcttccagtgtgagtgcccacaaggctactacctcagcgaggatacccgcatctgtgaagatattgatgagtgttttgcacatcctggtgtgtgtgggcctgggacctgctataacaccctgggaaattacacctgcatttgcccacctgagtacatgcaggtcaatggaggccacaactgcatggacatgagaaaaagcttttgctaccgaagctataatggaaccacttgtgagaatgagttgcctttcaatgtgacaaaaaggatgtgctgctgcacatataatgtgggcaaagcctggaacaaaccttgtgaaccatgcccaactccaggaacagctgactttaaaaccatatgtggaaatattcctggattcacctttgacattcacacaggaaaagctgttgacattgatgaatgtaaagagattccaggcatttgtgcaaatggtgtgtgcattaaccagattggcagtttccgctgtgaatgccctacaggattcagttacaatgacctgctgttggtttgtgaagatatagatgagtgcagcaatggtgataatctctgccagcggaatgcagactgcatcaatagtcctggtagttaccgctgtgaatgtgccgcgggtttcaaactttcacccaatggggcctgtgtagatcgcaatgaatgtttagaaattcctaacgtttgcagtcatggcttgtgtgttgatctgcaaggaagttaccagtgcatctgccacaatggctttaaggcttctcaggaccagaccatgtgcatggatgttgatgagtgcgagcggcatccatgtggaaatggaacttgtaaaaacaccgttggatcctataactgtctgtgctacccagggtttgaactcactcataataatgattgcctggacatagatgagtgcagttccttttttggtcaggtgtgcagaaatggacgttgttttaatgaaattggttctttcaagtgtctatgtaacgaaggttatgaacttaccccagatggcaaaaactgtatagacactaatgagtgtgtcgcccttcccggctcttgctctcctggtacctgtcagaatttggagggatccttcagatgcatctgtcccccagggtatgaagtaaaaagcgagaactgcattgatataaatgaatgtgatgaagatcccaacatttgtctttttggttcctgtactaatactccagggggcttccagtgcctctgcccccctggctttgtactatctgataatggacggagatgctttgatactcgccagagcttctgcttcacaaattttgaaaatggaaagtgttctgtacccaaagctttcaacaccacaaaagcaaaatgctgctgtagtaagatgccaggagagggctggggggacccctgtgagctgtgccccaaagacgatgaagttgcatttcaggatttgtgtccatatggccatggaactgtccctagtcttcatgatacacgtgaagatgtcaatgagtgtcttgagagcccaggcatttgttcaaatggtcaatgtatcaacaccgacggatcttttcgctgtgaatgtccaatgggctacaaccttgactacactggagtacgctgtgtggatactgatgagtgttcaatcggcaatccgtgtggaaatggtacatgcaccaatgttattgggagttttgaatgcaattgcaatgaaggctttgagccagggcccatgatgaattgtgaagatatcaacgaatgtgcccagaacccactgctgtgtgctttccgctgcatgaacacttttgggtcctatgaatgcacgtgcccgattggctatgccctcagggaagatcaaaagatgtgcaaagatctggatgaatgtgctgaagggttacacgactgtgaatctaggggcatgatgtgtaagaatctaatcggcaccttcatgtgcatctgccctcctggaatggcccgaaggcccgatggagaaggctgtgtagatgaaaatgaatgcaggaccaagccaggaatctgtgaaaatggacgttgtgttaacattattggaagctatagatgtgagtgtaatgaaggattccagtcaagttcttcaggcactgaatgccttgacaatcgacagggtctctgctttgcagaggtactgcagacaatatgtcaaatggcatccagtagtcgcaatctcgtcactaagtcagaatgctgctgtgatggtgggcgaggctggggccaccagtgcgagctttgcccacttcctggaactgcccagtacaaaaagatatgtcctcatggcccaggatatacaactgatggaagagatattgatgaatgtaaggtaatgccaaacctctgcaccaatggtcagtgcatcaataccatgggctcattccgatgcttctgcaaggttggctacaccacagacatcagtggaacctcttgtatagaccttgatgaatgctcccagtccccgaaaccatgcaactacatctgcaagaacactgaggggagttatcagtgttcatgtccgagggggtatgtcctgcaagaggatggaaagacatgcaaagaccttgatgaatgtcaaacaaagcagcataactgccagttcctctgtgtcaacaccctgggggggtttacctgtaaatgtccacctggtttcacacagcatcacactgcttgtatcgacaacaacgaatgtgggtctcaaccttcgctttgtggagcaaagggaatctgtcaaaacactccaggcagtttcagctgtgaatgccaaagagggttctctcttgatgccaccggactgaactgtgaagatgttgatgaatgtgatgggaaccacaggtgccaacacggctgccagaacatcctgggtggctacagatgtggctgcccccaaggctacatccagcactaccagtggaatcagtgtgtcgatgagaatgaatgctccaatcccaatgcctgtggctctgcttcctgctacaacaccctggggagttacaagtgcgcctgcccctcggggttctccttcgaccagttctccagtgcctgccacgacgtgaatgagtgctcgtcctccaagaacccctgcaattacggctgctctaacacggaggggggctacctctgtggctgcccccctgggtattacagagtgggacaaggccactgtgtctcaggaatgggatttaacaaggggcagtacctgtcactggatacagaggtcgatgaggaaaatgctctgtccccagaagcatgctacgagtgcaaaatcaacggctattctaagaaagacagcaggcagaagagaagtattcatgaacctgatcccactgctgttgaacagatcagcctagagagtgtcgacatggacagccccgtcaacatgaagttcaacctctcccacctcggctctaaggagcacatcctggaactaaggcccgccatccagcccctcaacaaccacatccgttatgtcatctctcaagggaacgatgacagcgtcttccgcatccaccaaaggaatgggctcagctacttgcacacggccaagaagaagctcatgcccggcacatacacactggaaatcactagcatccctctctacaagaagaaggagcttaagaaactggaagagagcaatgaggatgactacctcctaggggagcttggggaggctctcagaatgaggctgcagattcagctctattaacccttcacagacttgggcccaggctcaaatcctagcacagccagtctgcagaagcatttgaaaagtcaaggactaattttaaagaggaaaaataataataactcttgtttctttcctccctgtcttagactttgaatgttgaccctcacagggagggataatttagactctggtatggccaaagatttgagcacaaaggcaaccgtggttactgtattttttatataacttcattttaaaatatattaaaagaaacctaaatgttcaagatatcagcatatggcactaaatgcacaaaaataatgtgagctttttttttttttcctgttagcagtctgtaacactttgggtattttgctatagttgctaattaaaaaaatatagatgtttatttatttttaatgcagtaatatatggagaaatgaacaaactatgtaaacaaaaagggaaactcacttgtttttctttagatttataaatttgagctattttttttagaggtgctttttaaaaatccaatagatacaagagatgtttcctttggttttctgccagtcatccagctgatacacacctgatgattttaaagaaagccacacagagctgaatgggcagtgtaatcaataatttaaaaaacatgaatgtcattagatcctttataacgtagatcgaagccaaagcagctcatttgtgacaacatttcatatcaccagacacaccaggcaacagaagttgaagcacaaccactgtagcaaaataccttgactgcttgtgagaccattagcattgcaggccaaaccgtactgtatttccttctcataacctcaaggaaccatatgtgctacccacaacacctcattcttacccagggtgcgctgcgtcctcatggtactgtaggcagctgaagaaccgccgttcccttgaaagggaacacctggcattctgtggtgtttcgtgctgtcttaaataatggtgcatttattatgttcaagttatttcaggattgccatatgtgcaaacaaatcatgcaatgcagccaaggaatatatgttgttgttgttgttttaaacccattttttttttagaattttcattaatactgtagttatacaccatatgcctcattttatcatagcctattgtgtatgaaagatgtttgtacaatgaattgatgtttagtttgctttagtcatttaaaaagatattgtaccaggatgtgctattaagagcacgtatccattattcttctcaacccaagaacctgtttcctggaccagtgaccaaacctcatatgtgaaatggccaaagcacatgcaggctcctggttgttcctctcaaacctgtgctgaccaaagattagtaaccagttatacccagtattttgaggttttattgtttttttaataactaaaaagaaaaaaggaacagtgtaaatttgtaatcaagagtttgtgaggaaaaacttatggtttttggttttgtttgtttttgtaggtctgtgtatcaaatatgacacttttcttgcaataaagcttattttggggta

SEQ ID NO: 676 - protein, 2912 aa, Homo sapiens
MGRRRRLCLQLYFLWLGCVVLWAQGTAGQPQPPPPKPPRPQPPPQQVRSATAGSEGGFLAPEYREEGAAVASRVRRRGQQDVLRGPNVCGSRFHSYCCPGWKTLPGGNQCIVPICRNSCGDGFCSRPNMCTCSSGQISSTCGSKSIQQCSVRCMNGGTCADDHCQCQKGYIGTYCGQPVCENGCQNGGRCIGPNRCACVYGFTGPQCERDYRTGPCFTQVNNQMCQGQLTGIVCTKTLCCATIGRAWGHPCEMCPAQPQPCRRGFIPNIRTGACQDVDECQAIPGICQGGNCINTVGSFECRCPAGHKQSETTQKCEDIDECSIIPGICETGECSNTVGSYFCVCPRGYVTSTDGSRCIDQRTGMCFSGLVNGRCAQELPGRMTKMQCCCEPGRCWGIGTIPEACPVRGSEEYRRLCMDGLPMGGIPGSAGSRPGGTGGNGFAPSGNGNGYGPGGTGFIPIPGGNGFSPGVGGAGVGAGGQGPIITGLTILNQTIDICKHHANLCLNGRCIPTVSSYRCECNMGYKQDANGDCIDVDECTSNPCTNGDCVNTPGSYYCKCHAGFQRTPTKQACIDIDECIQNGVLCKNGRCVNTDGSFQCICNAGFELTTDGKNCVDHDECTTTNMCLNGMCINEDGSFKCICKPGFVLAPNGRYCTDVDECQTPGICMNGHCINSEGSFRCDCPPGLAVGMDGRVCVDTHMRSTCYGGIKKGVCVRPFPGAVTKSECCCANPDYGFGEPCQPCPAKNSAEFHGLCSSGVGITVDGRDINECALDPDICANGICENLRGSYRCNCNSGYEPDASGRNCIDIDECLVNRLLCDNGLCRNTPGSYSCTCPPGYVFRTETETCEDINECESNPCVNGACRNNLGSFNCECSPGSKLSSTGLICIDSLKGTCWLNIQDSRCEVNINGATLKSECCATLGAAWGSPCERCELDTACPRGLARIKGVTCEDVNECEVFPGVCPNGRCVNSKGSFHCECPEGLTLDGTGRVCLDIRMEQCYLKWDEDECIHPVPGKFRMDACCCAVGAAWGTECEECPKPGTKEYETLCPRGAGFANRGDVLTGRPFYKDINECKAFPGMCTYGKCRNTIGSFKCRCNSGFALDMEERNCTDIDECRISPDLCGSGICVNTPGSFECECFEGYESGFMMMKNCMDIDECERNPLLCRGGTCVNTEGSFQCDCPLGHELSPSREDCVDINECSLSDNLCRNGKCVNMIGTYQCSCNPGYQATPDRQGCTDIDECMIMNGGCDTQCTNSEGSYECSCSEGYALMPDGRSCADIDECENNPDICDGGQCTNIPGEYRCLCYDGFMASMDMKTCIDVNECDLNSNICMFGECENTKGSFICHCQLGYSVKKGTTGCTDVDECEIGAHNCDMHASCLNIPGSFKCSCREGWIGNGIKCIDLDECSNGTHQCSINAQCVNTPGSYRCACSEGFTGDGFTCSDVDECAENINLCENGQCLNVPGAYRCECEMGFTPASDSRSCQDIDECSFQNICVFGTCNNLPGMFHCICDDGYELDRTGGNCTDIDECADPINCVNGLCVNTPGRYECNCPPDFQLNPTGVGCVDNRVGNCYLKFGPRGDGSLSCNTEIGVGVSRSSCCCSLGKAWGNPCETCPPVNSTEYYTLCPGGEGFRPNPITIILEDIDECQELPGLCQGGNCINTFGSFQCECPQGYYLSEDTRICEDIDECFAHPGVCGPGTCYNTLGNYTCICPPEYMQVNGGHNCMDMRKSFCYRSYNGTTCENELPFNVTKRMCCCTYNVGKAWNKPCEPCPTPGTADFKTICGNIPGFTFDIHTGKAVDIDECKEIPGICANGVCINQIGSFRCECPTGFSYNDLLLVCEDIDECSNGDNLCQRNADCINSPGSYRCECAAGFKLSPNGACVDRNECLEIPNVCSHGLCVDLQGSYQCICHNGFKASQDQTMCMDVDECERHPCGNGTCKNTVGSYNCLCYPGFELTHNNDCLDIDECSSFFGQVCRNGRCFNEIGSFKCLCNEGYELTPDGKNCIDTNECVALPGSCSPGTCQNLEGSFRCICPPGYEVKSENCIDINECDEDPNICLFGSCTNTPGGFQCLCPPGFVLSDNGRRCFDTRQSFCFTNFENGKCSVPKAFNTTKAKCCCSKMPGEGWGDPCELCPKDDEVAFQDLCPYGHGTVPSLHDTREDVNECLESPGICSNGQCINTDGSFRCECPMGYNLDYTGVRCVDTDECSIGNPCGNGTCTNVIGSFECNCNEGFEPGPMMNCEDINECAQNPLLCAFRCMNTFGSYECTCPIGYALREDQKMCKDLDECAEGLHDCESRGMMCKNLIGTFMCICPPGMARRPDGEGCVDENECRTKPGICENGRCVNIIGSYRCECNEGFQSSSSGTECLDNRQGLCFAEVLQTICQMASSSRNLVTKSECCCDGGRGWGHQCELCPLPGTAQYKKICPHGPGYTTDGRDIDECKVMPNLCTNGQCINTMGSFRCFCKVGYTTDISGTSCIDLDECSQSPKPCNYICKNTEGSYQCSCPRGYVLQEDGKTCKDLDECQTKQHNCQFLCVNTLGGFTCKCPPGFTQHHTACIDNNECGSQPSLCGAKGICQNTPGSFSCECQRGFSLDATGLNCEDVDECDGNHRCQHGCQNILGGYRCGCPQGYIQHYQWNQCVDENECSNPNACGSASCYNTLGSYKCACPSGFSFDQFSSACHDVNECSSSKNPCNYGCSNTEGGYLCGCPPGYYRVGQGHCVSGMGFNKGQYLSLDTEVDEENALSPEACYECKINGYSKKDSRQKRSIHEPDPTAVEQISLESVDMDSPVNMKFNLSHLGSKEHILELRPAIQPLNNHIRYVISQGNDDSVFRIHQRNGLSYLHTAKKKLMPGTYTLEITSIPLYKKKELKKLEESNEDDYLLGELGEALRMRLQIQLY

SEQ ID NO: 677 - DNA, 21 bp, artificial
  Description of artificial sequence: Oligonucleotide
ggctggctttgctaaccgagg

SEQ ID NO: 678 - DNA, 21 bp, artificial
  Description of artificial sequence: Oligonucleotide
ccgtcaatgtccatgcagttc

SEQ ID NO: 679 - DNA, 593 bp, Homo sapiens
  misc_feature (469)..(469): n is a, c, g, t or u
  misc_feature (480)..(480): n is a, c, g, t or u
  misc_feature (507)..(507): n is a, c, g, t or u
  misc_feature (521)..(522): n is a, c, g, t or u
  misc_feature (546)..(547): n is a, c, g, t or u
  misc_feature (553)..(553): n is a, c, g, t or u
  misc_feature (561)..(561): n is a, c, g, t or u
  misc_feature (581)..(582): n is a, c, g, t or u
  misc_feature (589)..(589): n is a, c, g, t or u
ataatgcggacgctaccgactgccagatctttacactcacccctccacctgccccgaggagtccggtcacaagggcccagcccatcacaaagacacccaggtgtcccttccatttttttccacgaaggcccagaatccattttaggtttccaaacagacctttcgtcccttcaaggtgtaaccaccgttttccattccagccattttattggccacaccgttaccttacttataggtatttccccagaagaagactccagagagcaagctcatctgaggaaagctgagagggaagagaaacccaaacatactgaagcaaaaaaaagcctatccttcagaaaaaagcaacaaaaagatttctgttttatctttcgaaactaaaactattggatttgaagattaagtatcctaaacatcactgactagaaactgttctctttgtcagcagtgaagatattggatcataggnttattgatggnttgcaaaattggaccaaataaccacgnttatttttatcctnncaaccttcttatggctcacagganntatttnatgcaaantaaaatctattaaatgggannaaaaaanaaaa

SEQ ID NO: 680 - DNA, 22 bp, artificial
  Description of artificial sequence: Oligonucleotide
ctgccagatctttacactcacc

SEQ ID NO: 681 - DNA, 25 bp, artificial
  Description of artificial sequence: Oligonucleotide
gctttcctcagatgagcttgctctc

SEQ ID NO: 682 - DNA, 1587 bp, Homo sapiens
aaggagccagaggccatgcagtggctcagggtccgtgagtcgcctggggaggccacaggacacagggtcaccatggggacagccgccctgggtcccgtctgggcagcgctcctgctctttctcctgatgtgtgagatccctatggtggagctcacctttgacagagctgtggccagcggctgccaacggtgctgtgactctgaggaccccctggatcctgcccatgtatcctcagcctcttcctccggccgcccccacgccctgcctgagatcagaccctacattaatatcaccatcctgaagggtgacaaaggggacccaggcccaatgggcctgccagggtacatgggcagggagggtccccaaggggagcctggccctcagggcagcaagggtgacaagggggagatgggcagccccggcgccccgtgccagaagcgcttcttcgccttctcagtgggccgcaagacggccctgcacagcggcgaggacttccagacgctgctcttcgaaagggtctttgtgaaccttgatgggtgctttgacatggcgaccggccagtttgctgctcccctgcgtggcatctacttcttcagcctcaatgtgcacagctggaattacaaggagacgtacgtgcacattatgcataaccagaaagaggctgtcatcctgtacgcgcagcccagcgagcgcagcatcatgcagagccagagtgtgatgctggacctggcctacggggaccgcgtctgggtgcggctcttcaagcgccagcgcgagaacgccatctacagcaacgacttcgacacctacatcaccttcagcggccacctcatcaaggccgaggacgactgagggcctctgggccaccctcccggctggagagctcagctgatacggcatcctgcgagaagacctgccctcctcactgggatccccttcctgcctcctcccagggctctgccagggccttgctcagtcccttccaccaaagtcatctgaacttccgtttccccagggcctccagctgccctcagacactgatgtctgtccccaggtgctctctgcccctcatgcccctctcaccggcccagtgccccgactctccaggctttatcaaggtgctaaggcccgggtgggcagctcctcgtctcagagccctcctccggcctggtgctgcctttacaaacacctgcaggagaagggccacggaagccccaggctttagagccctcagcaggtctggggagctagagcaaaggagggacctcaggccttccgtttcttcttccagggtggggtggcctggtgttcccctagccttccaaacccaggtggcctgcccttctccccagagggaggcggcctccgcccattggtgctcatgcagactctggggctgaggtgccccggggggtgatctctggtgctcacagccgagggagccgtggctccatggccagatgacggaaacagggtctgaccaagtgccaggaagacctgtgctataaaccaccctgcctgatcctgcccctgcctgaccccgccacgccctgccgtccagcatgattaaagaatgctgtctcctca

SEQ ID NO: 683 - protein, 278 aa, Homo sapiens
MQWLRVRESPGEATGHRVTMGTAALGPVWAALLLFLLMCEIPMVELTFDRAVASGCQRCCDSEDPLDPAHVSSASSSGRPHALPEIRPYINITILKGDKGDPGPMGLPGYMGREGPQGEPGPQGSKGDKGEMGSPGAPCQKRFFAFSVGRKTALHSGEDFQTLLFERVFVNLDGCFDMATGQFAAPLRGIYFFSLNVHSWNYKETYVHIMHNQKEAVILYAQPSERSIMQSQSVMLDLAYGDRVWVRLFKRQRENAIYSNDFDTYITFSGHLIKAEDD

SEQ ID NO: 684 - DNA, 21 bp, artificial
  Description of artificial sequence: Oligonucleotide
catcctgaagggtgacaaagg

SEQ ID NO: 685 - DNA, 21 bp, artificial
  Description of artificial sequence: Oligonucleotide
gaggctgaagaagtagatgcc

SEQ ID NO: 686 - DNA, 551 bp, Homo sapiens
  misc_feature (43)..(43): n is a, c, g, t or u
  misc_feature (80)..(80): n is a, c, g, t or u
  misc_feature (84)..(84): n is a, c, g, t or u
  misc_feature (89)..(89): n is a, c, g, t or u
  misc_feature (149)..(149): n is a, c, g, t or u
  misc_feature (158)..(158): n is a, c, g, t or u
aggtccattaaggttttggctacaatggctctttgggggttgngaatagaattatccaagtattgtaaaagtcaatattnaccnaatgnattatttcctaaaaggcttaaacttgaattatatcatgtaaagatggcatctgtcttagncaacttggnctttatgcagtttgtcctttcagttttcaggaatgagacctcttgacccctcccctccaatgcagcccctactaagggggagtttaaggagccatacatagttctataattcaaatcaagtaaacatgcttcttgtcccaggttaacttgtgctgcctcagtcgctgtttaaacatttttatacgcactgttaacctgcctgcccattaccctattacttttaatgggtaaactactgttccctgggcagttgtctcttttaacgtcccaccctaaacttgccaaccctcatatgaaggcctcaggcttgttattggcaaaggtcagaagtcttaagctagtgaccttgcaggctaaagtaggccttgaatttgtttgaccaggaactaaatt

SEQ ID NO: 687 - DNA, 20 bp, artificial
  Description of artificial sequence: Oligonucleotide
taacttgtgctgcctcagtc

SEQ ID NO: 688 - DNA, 22 bp, artificial
  Description of artificial sequence: Oligonucleotide
ctttgccaataacaagcctgag
